(19) United States
(12) Patent Application Publication
(10) Pub. No.: US 2026/0193658 A1
(43) Pub. Date: Jul. 9, 2026

(54) COMPOSITIONS AND METHODS FOR INHIBITING EXPRESSION OF THE LECT2 GENE

(71) Applicant: ALNYLAM PHARMACEUTICALS, INC., CAMBRIDGE, MA (US)

(72) Inventors: HO-CHOU TU, BOSTON, MA (US); JAMES MCININCH, CAMBRIDGE, MA (US)

(73) Assignee: ALNYLAM PHARMACEUTICALS, INC., CAMBRIDGE, MA (US)

(21) Appl. No.: 19/390,197

(22) Filed: Nov. 14, 2025

Related U.S. Application Data
(62) Division of application No. 17/639,881, filed on Sep. 2, 2020, now abandoned.
(60) Provisional application No. 62/895,217, filed on Sep. 3, 2019.

(51) Int. Cl. C12N 15/113; A61K 31/713

(52) U.S. Cl. CPC C12N 15/1136; A61K 31/713; C12N 2310/14; C12N 2310/315; C12N 2310/351; C12N 2320/11

(57) ABSTRACT

The disclosure relates to double-stranded ribonucleic acid (dsRNA) compositions targeting the LECT2 gene, and methods of using such dsRNA compositions to alter (e.g., inhibit) expression of LECT2.

### RELATED APPLICATIONS

[0001] This application claims priority to U.S. provisional application No. 62/895,217, filed on Sep. 3, 2019. The entire content of each of the foregoing application is hereby incorporated herein by reference.

### SEQUENCE LISTING

[0002] The instant application contains a Sequence Listing which has been submitted electronically in XML format and is hereby incorporated by reference in its entirety. Said XML copy, created on Feb. 6, 2026, is named ALN-300-WO_SL.xml and is 6,051,241 bytes in size.

### FIELD OF THE DISCLOSURE

[0003] The disclosure relates to the specific inhibition of the expression of the LECT2 gene.

### BACKGROUND

[0004] Amyloidosis is a group of diseases characterized by deposition of insoluble fibrous protein aggregates, called amyloids, in organs or tissues. Amyloids can form from mutant or wild type proteins. One system of nomenclature for amyloid diseases uses an abbreviation for the protein that forms amyloid deposits, preceded by the letter “A.” Thus, for example, ALECT2 is the abbreviation for an amyloidosis involving deposit of amyloids formed from leukocyte cell derived chemotactic factor-2 (ALECT2).

[0005] LECT2 amyloidosis (ALECT2) is one of the most recently discovered types of amyloidosis. LECT2 amyloidosis has been observed in individuals with renal or hepatic amyloidosis. This form of amyloidosis can present with nephrotic syndrome or with liver involvement (e.g., hepatitis, e.g., chronic hepatitis). It may be particularly prevalent in Mexican Americans and/or individuals who are homozygous for the G allele encoding valine at position 40 in the mature LECT2 protein (or at position 58 in the unprocessed protein). Treatments for LECT2 amyloidosis are limited, and new treatments are needed.

### SUMMARY

[0006] The present disclosure describes methods and iRNA compositions for modulating the expression of a LECT2 gene. In certain embodiments, expression of a LECT2 gene is reduced or inhibited using a LECT2-specific iRNA. Such inhibition can be useful in treating disorders related to LECT2 expression, such as amyloidosis, e.g. a LECT2 amyloidosis (ALECT2).

[0007] Accordingly, described herein are compositions and methods that effect the RNA-induced silencing complex (RISC)-mediated cleavage of RNA transcripts of the LECT2 gene, such as in a cell or in a subject (e.g., in a mammal, such as a human subject). Also described are compositions and methods for treating a disorder related to expression of a LECT2 gene, such as a LECT2 amyloidosis.

[0008] In some embodiments, the LECT2 amyloidosis is a renal amyloidosis. In some embodiments, the LECT2 amyloidosis involves amyloid deposition in the kidney. In some embodiments, LECT2 amyloidosis is associated with renal disease (e.g., nephrotic syndrome). In some embodiments, the amyloidosis is associated with proteinuria. In some embodiments, proteinuria is absent. In some embodiments, the LECT2 amyloidosis is a hepatic amyloidosis. In some embodiments, the LECT2 amyloidosis involves amyloid deposition in the liver. In some embodiments, the LECT2 amyloidosis is associated with inflammation in the liver (e.g., hepatitis, e.g., chronic hepatitis). In some embodiments, the methods described herein are effective to inhibit amyloid deposition (e.g., by preventing amyloid deposition or reducing amyloid deposition, e.g., by reducing size, number, or extent of amyloid deposits) or symptoms associated with amyloid deposition.

[0009] As used herein, the term “iRNA,” “RNAi”, “iRNA agent,” “RNAi agent,” or “iRNA molecule,” refers to an agent that contains RNA as that term is defined herein, and which mediates the targeted cleavage of an RNA transcript, e.g., via an RNA-induced silencing complex (RISC) pathway. In one embodiment, an iRNA as described herein inhibits LECT2 expression in a cell or mammal.

[0010] The iRNAs (e.g., dsRNAs) included in the compositions featured herein include an RNA strand (the antisense strand) having a region, e.g., a region that is 30 nucleotides or less, generally 19-24 nucleotides in length, that is substantially complementary to at least part of an mRNA transcript of a LECT2 gene (e.g., a mouse or human LECT2 gene) (also referred to herein as a “LECT2-specific iRNA”). In some embodiments, the LECT2 mRNA transcript is a human LECT2 mRNA transcript, e.g., SEQ ID NO: 1. In some embodiments, the LECT2 mRNA transcript has a A to G substitution at nucleotide position 373 of SEQ ID NO: 1. In some embodiments, the mRNA transcript encodes valine at position 40 in the mature LECT2 protein (or amino acid 58 in the unprocessed protein). In some embodiments, the mRNA transcript encodes isoleucine at position 40 in the mature LECT2 protein (or amino acid 58 in the unprocessed protein).

[0011] In some embodiments, the iRNA (e.g., dsRNA) described herein comprises an antisense strand having a region that is substantially complementary to a region of a human LECT2 mRNA. In some embodiments, the human LECT2 mRNA has the sequence of NM_002302.2 (SEQ ID NO: 1). In some embodiments, the human LECT2 mRNA has a A to G substitution at nucleotide position 373 of SEQ ID NO: 1.

[0012] In other embodiments, an iRNA encompasses a dsRNA having an RNA strand (the antisense strand) having a region that is substantially complementary to a portion of a LECT2 mRNA. In one embodiment, the iRNA encompasses a dsRNA having an RNA strand (the antisense strand) having a region that is substantially complementary to a portion of a LECT2 mRNA, e.g., a human LECT2 mRNA (e.g., a human LECT2 mRNA as provided in NM_002302.2 (SEQ ID NO: 1) or having a A to G substitution at nucleotide position 373 of SEQ ID NO: 1).

[0013] In one embodiment, an iRNA for inhibiting expression of a LECT2 gene includes at least two sequences that are complementary to each other. The iRNA includes a sense strand having a first sequence and an antisense strand having a second sequence. The antisense strand includes a nucleotide sequence that is substantially complementary to at least part of an mRNA encoding a LECT2 transcript, and the region of complementarity is 30 nucleotides or less, and at least 15 nucleotides in length. Generally, the iRNA is 19 to 24 nucleotides in length.

[0014] In some embodiments, the iRNA is 19-21 nucleotides in length. In some embodiments, the iRNA is 19-21 nucleotides in length and is in a lipid formulation, e.g. a lipid nanoparticle (LNP) formulation (e.g., an LNP11 formulation). In one embodiment, the iRNA targeting LECT2 is formulated in a stable nucleic acid lipid particle (SNALP).

[0015] In some embodiments, the iRNA is 21-23 nucleotides in length. In some embodiments, the iRNA is 21-23 nucleotides in length and is in the form of a conjugate, e.g., conjugated to one or more GalNAc derivatives as described herein.

[0016] In some embodiments the iRNA is from about 15 to about 25 nucleotides in length, and in other embodiments the iRNA is from about 25 to about 30 nucleotides in length. An iRNA targeting LECT2, upon contact with a cell expressing LECT2, inhibits the expression of a LECT2 gene (e.g., by at least 10%, at least 20%, at least 25%, at least 30%, at least 35%, at least 40%, at least 45%, at least 50%, at least 55%, at least 60%, at least 65%, at least 70%, at least 75%, at least 80%, at least 85%, at least 90%, or at least 95%) when assayed by a method known in the art or as described herein.

[0017] In one embodiment, an iRNA (e.g., a dsRNA) featured herein comprises or consists of a first sequence of a dsRNA that is selected from the group consisting of the sense sequences of Tables 2A-2B, 3A-3B, 6, or 7 and a second sequence that is selected from the group consisting of the corresponding antisense sequences of Tables 2A-2B, 3A-3B, 6, or 7, or a pharmaceutically acceptable salt thereof.

[0018] In some embodiments, an iRNA (e.g., dsRNA) featured herein comprises or consists of a sense and/or antisense sequence selected from those provided in Tables 2A-2B, 3A-3B, 6, or 7, or a pharmaceutically acceptable salt thereof. In some embodiments, an iRNA (e.g., dsRNA) featured herein comprises or consists of a sense and/or antisense sequence selected from those of AD-454781, AD-133461, AD-454746, AD-86459, or AD-86460 as disclosed herein in the Examples. In some embodiments, the iRNA (e.g., dsRNA) has sense and/or antisense sequences selected from those of AD-454781, AD-133461, or AD-454746. In some embodiments, the iRNA (e.g., dsRNA) has the sense and/or antisense sequences AD-454781.

[0019] The iRNA molecules featured herein can include naturally occurring nucleotides or can include at least one modified nucleotide, including, but not limited to a 2′-O-methyl modified nucleotide, a nucleotide having a 5′-phosphorothioate group, and a terminal nucleotide linked to a cholesteryl derivative. Alternatively, the modified nucleotide may be chosen from the group of: a 2′-deoxy-2′-fluoro modified nucleotide, a 2′-deoxy-modified nucleotide, a locked nucleotide, an acyclic nucleotide, an abasic nucleotide, a glycol nucleotide, 2′-amino-modified nucleotide, 2′-alkyl-modified nucleotide, morpholino nucleotide, a phosphoramidate, and a non-natural base comprising nucleotide. Such a modified sequence can be based, e.g., on a first sequence of said iRNA selected from the group consisting of the sense sequences of Table 2A, 3A, or 6, and a second sequence selected from the group consisting of the corresponding antisense sequences of Table 2A, 3A, or 6.

[0020] In one embodiment, an iRNA (e.g., a dsRNA) featured herein comprises a sense strand comprising a sequence selected from the group consisting of SEQ ID NO: 143, SEQ ID NO: 29, or SEQ ID NO: 23. In one embodiment, an iRNA (e.g., a dsRNA) featured herein comprises an antisense strand comprising a sequence selected from the group consisting of SEQ ID NO: 144, SEQ ID NO: 30, or SEQ ID NO: 24. In one embodiment, the iRNA (e.g., a dsRNA) comprises a sense strand comprising the sequence of SEQ ID NO: 143. In one embodiment, the iRNA (e.g., a dsRNA) comprises an antisense strand comprising the sequence of SEQ ID NO: 144.

[0021] In one embodiment, an iRNA (e.g., a dsRNA) featured herein comprises a sense strand comprising a sequence selected from the group consisting of SEQ ID NO: 370, SEQ ID NO: 294, or SEQ ID NO: 290. In one embodiment, an iRNA (e.g., a dsRNA) featured herein comprises an antisense strand comprising a sequence selected from the group consisting of SEQ ID NO: 371, SEQ ID NO: 295, or SEQ ID NO: 291. In one embodiment, the iRNA (e.g., a dsRNA) comprises a sense strand comprising the sequence of SEQ ID NO: 370. In one embodiment, the iRNA (e.g., a dsRNA) comprises an antisense strand comprising the sequence of SEQ ID NO: 371.

[0022] In one embodiment, an iRNA as described herein targets a wildtype LECT2 RNA transcript variant, and in another embodiment, the iRNA targets a mutant transcript (e.g., a LECT2 RNA carrying an allelic variant). For example, an iRNA featured in the disclosure can target a polymorphic variant, such as a single nucleotide polymorphism (SNP), of LECT2.

[0023] In some embodiments, the iRNA (e.g., dsRNA) targets (e.g., reduces) mRNA that encodes valine at position 40 in the mature LECT2 protein (or amino acid 58 in the unprocessed protein). In some embodiments, the iRNA (e.g., dsRNA) targets (e.g., reduces) mRNA that encodes isoleucine at position 40 in the mature LECT2 protein (or amino acid 58 in the unprocessed protein). In another embodiment, the iRNA (e.g., dsRNA) targets (e.g., reduces) both mRNA that encodes valine and mRNA that encodes isoleucine at position 40 in the mature LECT2 protein (or amino acid 58 in the unprocessed protein).

[0024] In another embodiment, the iRNA targets both a wildtype and a mutant LECT2 transcript. In yet another embodiment, the iRNA targets a particular transcript variant of LECT2. In yet another embodiment, the iRNA agent targets multiple transcript variants.

[0025] In one embodiment, an iRNA featured in the disclosure targets a non-coding region of a LECT2 RNA transcript, such as the 5′ or 3′ untranslated region of a transcript.

[0026] In some embodiments, an iRNA as described herein is in the form of a conjugate, e.g., a carbohydrate conjugate, which may serve as a targeting moiety and/or ligand, as described herein. In one embodiment, the conjugate is attached to the 3′ end of the sense strand of the dsRNA. In some embodiments, the conjugate is attached via a linker, e.g., via a bivalent or trivalent branched linker.

[0027] In some embodiments, the conjugate comprises one or more N-acetylgalactosamine (GalNAc) derivatives. Such a conjugate is also referred to herein as a GalNAc conjugate. In some embodiments, the conjugate targets the RNAi agent (e.g., dsRNA) to a particular cell, e.g., a liver cell, e.g., a hepatocyte. The GalNAc derivatives can be attached via a linker, e.g., a bivalent or trivalent branched linker. In particular embodiments, the conjugate is

[chemical structure]

[0028] In some embodiments, the RNAi agent is attached to the carbohydrate conjugate via a linker, e.g., a linker as shown in the following schematic, wherein X is O or S

[chemical structure]

[0029] In some embodiments, X is O. In some embodiments, X is S.

[0030] In some embodiments, the RNAi agent is conjugated to L96 as defined in Table 1 and shown below.

[chemical structure]

[0031] In some embodiments, the RNAi agent is conjugated to a ligand that targets the RNAi (e.g., dsRNA) to a desired organ (e.g., the liver) or to a particular cell type (e.g., hepatocytes). In some embodiments, the RNAi agent is conjugated to a ligand (e.g., a GalNAc ligand, e.g., L96) that targets the RNAi agent (e.g., dsRNA) to the liver.

[0032] In an aspect provided herein is a pharmaceutical composition for inhibiting the expression of a LECT2 gene in an organism, generally a human subject. The composition typically includes one or more of the iRNAs described herein and a pharmaceutically acceptable carrier or delivery vehicle. In one embodiment, the composition is used for treating a disorder related to LECT2 expression, e.g., amyloidosis, e.g., LECT2 amyloidosis.

[0033] In one aspect, an iRNA provided herein is a double-stranded ribonucleic acid (dsRNA) for inhibiting expression of LECT2, wherein said dsRNA comprises a sense strand and an antisense strand 15-30 base pairs in length and the antisense strand is complementary to at least 15 nucleotides of a target sequence for a duplex disclosed in Tables 2A-2B, 3A-3B, 4A-4B, or 5-7, or a pharmaceutically acceptable salt thereof.

[0034] In some embodiments, the antisense strand is complementary to at least 15, 16, 17, 18, 19, 20, 21, 22, or 23 nucleotides of a target sequence for a duplex disclosed in Tables 2A-2B, 3A-3B, 4A-4B, or 5-7. In some embodiments, the antisense strand is complementary to at least 15, 16, 17, 18, 19, 20, 21, 22, or 23 contiguous nucleotides of a target sequence for a duplex disclosed in Tables 2A-2B, 3A-3B, 4A-4B, or 5-7.

[0035] In some embodiments, the antisense strand is complementary to at least 15, 16, 17, 18, 19, 20, 21, 22, or 23 nucleotides of a target sequence for a duplex disclosed in Tables 2A-2B, 3A-3B, 6, or 7. In some embodiments, the antisense strand is complementary to at least 15, 16, 17, 18, 19, 20, 21, 22, or 23 contiguous nucleotides of a target sequence for a duplex disclosed in Tables 2A-2B, 3A-3B, 6, or 7.

[0036] In some embodiments, the antisense strand is complementary to at least 15, 16, 17, 18, 19, 20, 21, 22, or 23 nucleotides of the target sequence of the duplex AD-454781, AD-133461, AD-454746, AD-86459, or AD-86460. In some embodiments, the antisense strand is complementary to at least 15, 16, 17, 18, 19, 20, 21, 22, or 23 contiguous nucleotides of the target sequence of the duplex AD-454781, AD-133461, AD-454746, AD-86459, or AD-86460.

[0037] In some embodiments, the antisense strand is complementary to at least 15, 16, 17, 18, 19, 20, 21, 22, or 23 nucleotides of the target sequence of the duplex AD-454781, AD-133461, or AD-454746. In some embodiments, the antisense strand is complementary to at least 15, 16, 17, 18, 19, 20, 21, 22, or 23 contiguous nucleotides of the target sequence of the duplex AD-454781, AD-133461, or AD-454746.

[0038] In some embodiments, the antisense strand is complementary to at least 15, 16, 17, 18, 19, 20, 21, 22, or 23 nucleotides of the target sequence of the duplex AD-454781. In some embodiments, the antisense strand is complementary to at least 15, 16, 17, 18, 19, 20, 21, 22, or 23 contiguous nucleotides of the target sequence of the duplex AD-454781. In some embodiments, the antisense strand is complementary to all nucleotides of the target sequence of the duplex AD-454781.

[0039] In some embodiments, the antisense strand is complementary to at least 15, 16, 17, 18, 19, 20, 21, 22, or 23 nucleotides of a target sequence provided in Table 2A, 3A, or 6. In some embodiments, the antisense strand is complementary to at least 15, 16, 17, 18, 19, 20, 21, 22, or 23 contiguous nucleotides of a target sequence provided in Table 2A, 3A, or 7.

[0040] In some embodiments, the antisense strand is complementary to at least 15, 16, 17, 18, 19, 20, 21, 22, or 23 contiguous nucleotides of SEQ ID NOs: 145, 31, or 25. In some embodiments, the antisense strand is complementary to at least 15, 16, 17, 18, 19, 20, 21, 22, or 23 contiguous nucleotides of SEQ ID NO: 145. In some embodiments, the antisense strand is complementary to all nucleotides of SEQ ID NO: 145.

[0041] In a further aspect, an iRNA provided herein is a double stranded RNAi (dsRNA) comprising a sense strand complementary to an antisense strand, wherein said antisense strand comprises a region of complementarity to a LECT2 RNA transcript, wherein each strand has about 14 to about 30 nucleotides, wherein said double stranded RNAi agent is represented by formula (III):

[chemical structure]

[0042] wherein:
[0043] i, j, k, and l are each independently 0 or 1;
[0044] p, p′, q, and q′ are each independently 0-6;
[0045] each Nₐ and Nₐ′ independently represents an oligonucleotide sequence comprising 0-25 nucleotides which are either modified or unmodified or combinations thereof, each sequence comprising at least two differently modified nucleotides;
[0046] each N_{b} and N_{b}′ independently represents an oligonucleotide sequence comprising 0-10 nucleotides which are either modified or unmodified or combinations thereof;
[0047] each nₚ, nₚ′, n_{q}, and n_{q}′ independently represents an overhang nucleotide;
[0048] XXX, YYY, ZZZ, X′X′X′, Y′Y′Y′, and Z′Z′Z′ each independently represent one motif of three identical modifications on three consecutive nucleotides;
[0049] modifications on N_{b} differ from the modification on Y and modifications on N_{b}′ differ from the modification on Y′.

[0050] In some embodiments, the sense strand is conjugated to at least one ligand.

[0051] In some embodiments, i is 1; j is 1; or both i and j are 1.

[0052] In some embodiments, k is 1; l is 1; or both k and l are 1.

[0053] In some embodiments, XXX is complementary to X′X′X′, YYY is complementary to Y′Y′Y′, and ZZZ is complementary to Z′Z′Z′.

[0054] In some embodiments, the Y′Y′Y′ motif occurs at the 11, 12 and 13 positions of the antisense strand from the 5′-end.

[0055] In some embodiments, the Y′ is 2′-O-methyl.

[0056] In some embodiments, the duplex region is 15-30 nucleotide pairs in length. In some embodiments, the duplex region is 17-23 nucleotide pairs in length. In some embodiments, the duplex region is 19-21 nucleotide pairs in length. In some embodiments, the duplex region is 21-23 nucleotide pairs in length.

[0057] In some embodiments, the modifications on the nucleotides are selected from the group consisting of a locked nucleic acid (LNA), an acyclic nucleotide, a hexitol or hexose nucleic acid (HNA), a cyclohexene nucleic acid (CeNA), a glycol nucleic acid (GNA), 2′-methoxyethyl, 2′-O-alkyl, 2′-O-allyl, 2′-C-allyl, 2′-fluoro, 2′-deoxy, 2′-hydroxyl, and any combination thereof.

[0058] In some embodiments, the modifications on the nucleotides are 2′-O-methyl, 2′-fluoro, or both, and optionally glycol nucleic acid (GNA).

[0059] In some embodiments, the ligand comprises a carbohydrate.

[0060] In some embodiments, the ligand is attached via a linker.

[0061] In some embodiments, the linker is a bivalent or trivalent branched linker.

[0062] In some embodiments, the ligand is

[chemical structure]

[0063] In some embodiments, the ligand and linker are as shown in Formula XXIV:

[chemical structure]

[0064] In some embodiments, the ligand is attached to the 3′ end of the sense strand.

[0065] In some embodiments, the dsRNA has (e.g., comprises) a nucleotide sequence (e.g., a sense and/or antisense sequence) selected from the group of sequences provided in Tables 2A-2B, 3A-3B, 6, or 7.

[0066] In a further aspect, an iRNA provided herein is a double-stranded ribonucleic acid (dsRNA) for inhibiting expression of LECT2, wherein said dsRNA comprises a sense strand and an antisense strand, the antisense strand comprising a region of complementarity to a LECT2 RNA transcript, which antisense strand comprises at least 15 contiguous nucleotides differing by no more than 3 nucleotides from one of the antisense sequences listed in any one of Tables 2A-2B, 3A-3B, 6, or 7, or a pharmaceutically acceptable salt thereof.

[0067] In some embodiments, the antisense strand comprises at least 15, 16, 17, 18, 19, 20, 21, 22, or 23 contiguous nucleotides differing by no more than 3 nucleotides from one of the antisense sequences listed in any one of Tables 2A-2B, 3A-3B, 6, or 7. In some embodiments, the antisense strand comprises at least 15, 16, 17, 18, 19, 20, 21, 22, or 23 contiguous nucleotides differing by no more than 2 nucleotides from one of the antisense sequences listed in any one of Tables 2A-2B, 3A-3B, 6, or 7. In some embodiments, the antisense strand comprises at least 15, 16, 17, 18, 19, 20, 21, 22, or 23 contiguous nucleotides differing by no more than 1 nucleotide from one of the antisense sequences listed in any one of Tables 2A-2B, 3A-3B, 6, or 7.

[0068] In some embodiments, the sense strand comprises at least 15, 16, 17, 18, 19, 20, 21, 22, or 23 contiguous nucleotides differing by no more than 3 nucleotides from one of the antisense sequences listed in any one of Tables 2A-2B, 3A-3B, 6, or 7. In some embodiments, the sense strand comprises at least 15, 16, 17, 18, 19, 20, 21, 22, or 23 contiguous nucleotides differing by no more than 2 nucleotides from one of the antisense sequences listed in any one of Tables 2A-2B, 3A-3B, 6, or 7. In some embodiments, the sense strand comprises at least 15, 16, 17, 18, 19, 20, 21, 22, or 23 contiguous nucleotides differing by no more than 1 nucleotide from one of the antisense sequences listed in any one of Tables 2A-2B, 3A-3B, 6, or 7.

[0069] In some embodiments, the sense and antisense sequences are selected from those of the duplexes AD-454781, AD-133461, AD-454746, AD-86459, or AD-86460 as disclosed in the Examples. In some embodiments, the sense and antisense sequences are selected from those of the duplexes AD-454781, AD-133461, or AD-454746. In some embodiments, the sense and antisense sequences are those of the duplex AD-454781. In some embodiments, the sense and antisense sequences are those of a duplex disclosed herein that suppresses LECT2 mRNA expression by at least 50%, 55%, 60%, 65%, 70%, 75%, 80%, 85%, 90%, or 95%, e.g., as assessed using an assay disclosed in the Examples provided herein.

[0070] In some embodiments, the dsRNA comprises at least one modified nucleotide. In some embodiments, no more than five of the sense strand nucleotides and not more than five of the nucleotides of the antisense strand of the dsRNA are unmodified nucleotides. In some embodiments, all of the nucleotides of the sense strand and all of the nucleotides of the antisense strand of the dsRNA comprise a modification.

[0071] In some embodiments, at least one of the modified nucleotides is chosen from the group consisting of: a 2′-O-methyl modified nucleotide, a nucleotide comprising a 5′-phosphorothioate group, and a terminal nucleotide linked to a cholesteryl derivative or dodecanoic acid bisdecylamide group.

[0072] In some embodiments, the modified nucleotide is chosen from the group consisting of: a 2′-deoxy-2′-fluoro modified nucleotide, a 2′-deoxy-modified nucleotide, a locked nucleotide, an acyclic nucleotide, an abasic nucleotide, a glycol nucleotide, 2′-amino-modified nucleotide, 2′-alkyl-modified nucleotide, morpholino nucleotide, a phosphoramidate, and a non-natural base comprising nucleotide.

[0073] In some embodiments, the dsRNA comprises a 2′-O-methyl modified nucleotide, a 2′-fluoro modified nucleotide, or both, and optionally a glycol nucleotide.

[0074] In some embodiments, the dsRNA comprises at least 1, 2, 3, 4, 5, 6, 7, 8, 9, 10, 11, 12, 13, 14, 15, 16, 17, or more 2′-O-methyl modified nucleotides in the sense strand. In some embodiments, the dsRNA comprises at least 1, 2, 3, 4, 5, 6, 7, 8, 9, 10, 11, 12, 13, 14, 15, 16, 17, 18, 19, 20, or more 2′-O-methyl modified nucleotides in the antisense strand.

[0075] In some embodiments, the dsRNA comprises at least 1, 2, 3, 4, or more 2′-fluoro modified nucleotides in the sense strand. In some embodiments, the dsRNA comprises a 2′-fluoro modified nucleotide at position 7, position 9, position 10, position 11, or a combination thereof, of the sense strand. In some embodiments, the dsRNA comprises 2′-fluoro modified nucleotides at position 7, position 9, position 10, and position 11, of the sense strand. In some embodiments, the dsRNA comprises at least 1, 2, 3, 4, 5, 6, 7, or more 2′-fluoro modified nucleotides in the antisense strand. In some embodiments, the dsRNA comprises a 2′-fluoro modified nucleotide at position 2, position 4, position 6, position 8, position 9, position 14, position 16, or a combination thereof, of the antisense strand. In some embodiments, the dsRNA comprises 2′-fluoro modified nucleotides at position 2, position 14, and position 16, of the antisense strand. In some embodiments, the dsRNA comprises 2′-fluoro modified nucleotides at position 2, position 6, position 8, position 9, position 14, and position 16, of the antisense strand. In some embodiments, the dsRNA comprises 2′-fluoro modified nucleotides at position 2, position 4, position 8, position 9, position 12, position 14, and position 16, of the antisense strand.

[0076] In some embodiments, the dsRNA further comprises a glycol nucleotide. In some embodiments, the glycol nucleotide is present in the antisense strand. In some embodiments, the glycol nucleotide is present at position 7 of the antisense strand.

[0077] In some embodiments, the dsRNA comprises a phosphorothioate linkage between position 1 and position 2, between position 2 and position 3, or both, of the sense strand. In some embodiments, the dsRNA comprises phosphorothioate linkages between position 1 and position 2 and between position 2 and position 3 of the sense strand.

[0078] In some embodiments, the dsRNA comprises a phosphorothioate linkage between position 1 and position 2, between position 2 and position 3, between position 21 and position 22, between position 22 and position 23, or a combination thereof, of the antisense strand. In some embodiments, the dsRNA comprises phosphorothioate linkages between position 1 and position 2, between position 2 and position 3, between position 21 and position 22, and between position 22 and position 23, of the antisense strand.

[0079] In some embodiments, the region of complementarity is at least 17 nucleotides in length. In some embodiments, the region of complementarity is between 19 and 23 nucleotides in length. In some embodiments, the region of complementarity is 21 nucleotides in length.

[0080] In some embodiments, each strand is no more than 30 nucleotides in length. In some embodiments, each strand is between 21 nucleotides and 23 nucleotides in length. In some embodiments, the sense strand is 21 nucleotides in length. In some embodiments, the antisense strand is 23 nucleotides in length. In some embodiments, the sense strand is 21 nucleotides in length and the antisense strand is 23 nucleotides in length.

[0081] In some embodiments, at least one strand comprises a 3′ overhang of at least 1 nucleotide. In some embodiments, at least one strand comprises a 3′ overhang of at least 2 nucleotides. In some embodiments, the dsRNA comprises a blunt end. In some embodiments, the dsRNA comprises a 3′ overhang and a blunt end.

[0082] In some embodiments, an iRNA (e.g., a dsRNA) described herein further comprises a ligand. In some embodiments, the ligand is a GalNAc ligand. In some embodiments, the ligand targets the iRNA (e.g., the dsRNA) to the liver (e.g., to hepatocytes). In some embodiments, the ligand is conjugated to the 3′ end of the sense strand of the dsRNA.

[0083] In some embodiments, the region of complementarity consists of an antisense sequence selected from the antisense sequences provided in Tables 2A-2B, 3A-3B, 6, or 7. In some embodiments, the region of complementarity consists of an antisense sequence selected from that of AD-454781, AD-133461, AD-454746, AD-86459, or AD-86460 as disclosed in the Examples. In some embodiments, the region of complementarity consists of an antisense sequence selected from that of AD-454781, AD-133461, or AD-454746. In some embodiments, the region of complementarity consists of the antisense sequence of the duplex AD-454781. In some embodiments, the region of complementarity consists of an antisense sequence selected from a duplex disclosed herein, wherein the duplex suppresses LECT2 mRNA or protein expression by at least 20%, 30%, 40%, 50%, 60%, 70%, 80%, 85% or 90%.

[0084] In some embodiments, the dsRNA comprises a sense strand comprising or consisting of a sense strand sequence selected from Tables 2A-2B, 3A-3B, 6, or 7, and an antisense strand comprising or consisting of an antisense sequence selected from Tables 2A-2B, 3A-3B, 6, or 7. In some embodiments, the dsRNA comprises or consists of a pair of corresponding sense and antisense sequences selected from those of the duplexes disclosed in Tables 2A-2B, 3A-3B, 4A-4B, or 5-7. In certain embodiments, the dsRNA comprises or consists of a pair of corresponding sense and antisense sequences selected from those of the duplexes disclosed in Table 2A, 3A, or 6. In certain embodiments, the dsRNA comprises or consists of a pair of corresponding sense and antisense sequences selected from those of the duplexes disclosed in Table 2B, 3B, or 7. In certain embodiments, the dsRNA comprises or consists of a pair of corresponding sense and antisense sequences selected from those of the duplexes disclosed in Table 4A or 4B. In certain embodiments, the dsRNA comprises or consists of a pair of corresponding sense and antisense sequences selected from those of the duplexes disclosed in Table 5.

[0085] In one aspect, the disclosure provides a double-stranded ribonucleic acid (dsRNA) for inhibiting expression of LECT2, wherein said dsRNA comprises a sense strand and an antisense strand, the antisense strand comprising a region of complementarity to a LECT2 RNA transcript, wherein the sense strand comprises the sequence and all of the modifications of csasugugCfaCfAfUfugaaaacuguL96 (SEQ ID NO: 23) and the antisense strand comprises the sequence and all of the modifications of asCfsaGfuu(Tgn)UfCfaaUfgUfgCfacaugscsg (SEQ ID NO: 24).

[0086] In one aspect, the disclosure provides a double-stranded ribonucleic acid (dsRNA) for inhibiting expression of LECT2, wherein said dsRNA comprises a sense strand and an antisense strand, the antisense strand comprising a region of complementarity to a LECT2 RNA transcript, wherein the sense strand comprises the sequence and all of the modifications of asusggucAfgAfUfCfuucaaaauaaL96 (SEQ ID NO: 29) and the antisense strand comprises the sequence and all of the modifications of usUfsauuu(Tgn)gaagauCfuGfaccaususg (SEQ ID NO: 30).

[0087] In one aspect, the disclosure provides a double-stranded ribonucleic acid (dsRNA) for inhibiting expression of LECT2, wherein said dsRNA comprises a sense strand and an antisense strand, the antisense strand comprising a region of complementarity to a LECT2 RNA transcript, wherein the sense strand comprises the sequence and all of the modifications of gsgsucagAfuCfUfUfcaaaauaaauL96 (SEQ ID NO: 143) and the antisense strand comprises the sequence and all of the modifications of asUfsuuaUfuUfUfgaagAfuCfugaccsgsg (SEQ ID NO: 144).

[0088] In one aspect, the disclosure provides a cell containing at least one iRNA (e.g., dsRNAs) disclosed herein. The cell is typically a mammalian cell, such as a human cell. In some embodiments, the cell is a liver cell (e.g., a hepatocyte).

[0089] In one aspect, the disclosure provides a human cell (e.g., a human cell described herein) comprising a reduced level of LECT2 mRNA or a level of LECT2 protein as compared to an otherwise similar untreated cell, wherein optionally the level is reduced by at least 10%, 15%, 20%, 25%, 30%, 35%, 40%, 45%, 50%, 55%, 60%, 65%, 70%, 75%, 80%, 85%, 90%, or 95%.

[0090] In some embodiments, the human cell was produces by a process comprising contacting a human cell (e.g., a human cell described herein) with the dsRNA, e.g., a dsRNA described herein.

[0091] In an aspect provided herein is a pharmaceutical composition for inhibiting expression of a LECT2 gene, the composition comprising an iRNA (e.g., a dsRNA) described herein.

[0092] In some embodiments of the pharmaceutical compositions described herein, the iRNA (e.g., dsRNA) is administered in an unbuffered solution. In some embodiments, the unbuffered solution is saline or water.

[0093] In some embodiments of the pharmaceutical compositions described herein, the iRNA (e.g., dsRNA is administered with a buffer solution. In some embodiments, the buffer solution comprises acetate, citrate, prolamine, carbonate, or phosphate or any combination thereof. In some embodiments, the buffer solution is phosphate buffered saline (PBS).

[0094] In some embodiments of the pharmaceutical compositions described herein, the iRNA (e.g., dsRNA) is targeted to the liver (e.g., to hepatocytes).

[0095] In some embodiments of the pharmaceutical compositions described herein, the composition is administered intravenously. In some embodiments of the pharmaceutical compositions described herein, the composition is administered subcutaneously.

[0096] In some embodiments, a pharmaceutical composition comprises an iRNA (e.g., a dsRNA) described herein that comprises a ligand (e.g., a GalNAc ligand) that targets the iRNA (e.g., dsRNA) to a liver cell, e.g., a hepatocyte.

[0097] In some embodiments, a pharmaceutical composition comprises an iRNA (e.g., a dsRNA) described herein that comprises a ligand (e.g., a GalNAc ligand), and the pharmaceutical composition is administered subcutaneously. In some embodiments, the ligand targets the iRNA (e.g., dsRNA) to a liver cell, e.g., a hepatocyte.

[0098] In certain embodiments, a pharmaceutical composition, e.g., a composition described herein, includes a lipid formulation. In some embodiments, the RNAi agent is in an LNP formulation, e.g., a MC3 formulation. In some embodiments, the LNP formulation targets the RNAi agent to a particular cell, e.g., a liver cell (e.g., a hepatocyte). In some embodiments, the lipid formulation is a LNP11 formulation. In some embodiments, the composition is administered intravenously.

[0099] In another embodiment, the pharmaceutical composition is formulated for administration according to a dosage regimen described herein, e.g., not more than once every four weeks, not more than once every three weeks, not more than once every two weeks, or not more than once every week. In another embodiment, the administration of the pharmaceutical composition can be maintained for a month or longer, e.g., one, two, three, or six months, or one year or longer.

[0100] In another embodiment, a composition containing an iRNA featured in the disclosure, e.g., a dsRNA targeting LECT2, is administered in conjunction with a second therapy for a disorder related to LECT2 expression (e.g., a LECT2 amyloidosis). An iRNA or composition comprising an iRNA provided herein can be administered before, after, or concurrent with a second therapy. In some embodiments, the iRNA is administered before the second therapy. In some embodiments, the iRNA is administered after the second therapy. In some embodiments, the iRNA is administered concurrent with the second therapy.

[0101] In some embodiments, the second therapy is a non-iRNA therapeutic agent that is effective to treat the disorder or symptoms of the disorder.

[0102] In some embodiments, the disorder to be treated by the compositions or methods disclosed herein is a LECT2 amyloidosis that affects kidney function, e.g., through amyloid deposition in the kidney. In some such embodiments, the iRNA is administered in conjunction with a therapy that supports kidney function (e.g., dialysis). In some embodiments, the iRNA is administered in conjunction with a diuretic, an ACE (angiotensin converting enzyme) inhibitor, an angiotensin receptor blocker, and/or dialysis, e.g., to support or manage kidney function.

[0103] In some embodiments, the disorder to be treated by the compositions or methods disclosed herein is a LECT2 amyloidosis involving amyloid deposits in the liver. In some such embodiments, the iRNA is administered in conjunction with a therapy that supports liver function.

[0104] In some embodiments, the disorder to be treated by the compositions or methods disclosed herein is a LECT2 amyloidosis, and the iRNA is administered in conjunction with removal of all or part of the organ(s) affected by the amyloidosis (e.g., resection of all or part of kidney or liver tissue affected by the amyloidosis). The removal is optionally conducted in conjunction with a replacement of all or part of the organ removed (e.g., in conjunction with a kidney or liver organ transplant).

[0105] In an aspect provided herein is a method of inhibiting LECT2 expression in a cell, the method comprising: (a) introducing into the cell an iRNA (e.g., a dsRNA) described herein and (b) maintaining the cell of step (a) for a time sufficient to obtain degradation of the mRNA transcript of a LECT2 gene, thereby inhibiting expression of the LECT2 gene in the cell.

[0106] In an aspect, provided herein is a method of inhibiting LECT2 expression in a cell (e.g., a cell described herein), the method comprising: (a) contacting, e.g., introducing into the cell an iRNA (e.g., a dsRNA) described herein and (b) maintaining the cell of step (a) for a time sufficient to obtain to reduce levels of the LECT2 mRNA, LECT2 protein, or both of LECT2 mRNA or LECT2 protein, thereby inhibiting expression of the LECT2 gene in the cell.

[0107] In an aspect provided herein is a method for reducing or inhibiting the expression of a LECT2 gene in a cell (e.g., a liver cell, e.g., a hepatocyte). The method includes contacting the cell with a dsRNA as described herein, thereby inhibiting expression of a LECT2 gene. “Contacting,” as used herein, includes directly contacting a cell, as well as indirectly contacting a cell. For example, a cell within a subject (e.g., a liver cell) may be contacted when a composition comprising an RNAi is administered (e.g., intravenously or subcutaneously) to the subject.

[0108] In some embodiments, the method includes:
[0109] (a) introducing into the cell a double-stranded ribonucleic acid (dsRNA), wherein the dsRNA includes at least two sequences that are complementary to each other. The dsRNA has a sense strand having a first sequence and an antisense strand having a second sequence; the antisense strand has a region of complementarity that is substantially complementary to at least a part of an mRNA encoding LECT2, and where the region of complementarity is 30 nucleotides or less, e.g., 15-30 nucleotides in length, and generally 19-24 nucleotides in length, and where the dsRNA upon contact with a cell expressing LECT2, inhibits expression of a LECT2 gene by at least 10%, e.g., at least 20%, at least 30%, at least 40%, at least 50%, at least 60%, at least 70%, at least 80%, at least 90%, or more; and
[0110] (b) maintaining the cell of step (a) for a time sufficient to obtain degradation of the mRNA transcript of the LECT2 gene, thereby reducing or inhibiting expression of a LECT2 gene in the cell.

[0111] In some embodiments of the foregoing methods of inhibiting LECT2 expression in a cell, the cell is treated ex vivo, in vitro, or in vivo. In some embodiments, the cell is a hepatocyte.

[0112] In some embodiments, the cell is present in a subject in need of treatment, prevention and/or management of a disorder related to LECT2 expression.

[0113] In some embodiments, the disorder is a LECT2 amyloidosis, as described herein.

[0114] In some embodiments, the expression of LECT2 is inhibited by at least 30%, at least 35%, at least 40%, at least 45%, at least 50%, at least 55%, at least 60%, at least 65%, at least 70%, at least 75%, at least 80%, at least 85%, at least 90%, or at least 95%, e.g., as determined by a method described herein.

[0115] In some embodiments, the expression of LECT2 mRNA is inhibited by at least 30%, at least 35%, at least 40%, at least 45%, at least 50%, at least 55%, at least 60%, at least 65%, at least 70%, at least 75%, at least 80%, at least 85%, at least 90%, or at least 95%. In some embodiments, the expression of LECT2 protein is inhibited by at least 30%, at least 35%, at least 40%, at least 45%, at least 50%, at least 55%, at least 60%, at least 65%, at least 70%, at least 75%, at least 80%, at least 85%, at least 90%, or at least 95%.

[0116] In some embodiments, the iRNA (e.g., dsRNA) has an IC₅₀ in the range of 0.0005-1 nM, e.g., between 0.001 and 0.2 nM, between 0.002 and 0.1 nM, between 0.005 and 0.075 nM, or between 0.01 and 0.05 nM. In some embodiments, the iRNA (e.g., dsRNA) has an IC₅₀ equal to or less than 0.02 nM, e.g., between 0.0005 and 0.02 nM, between 0.001 and 0.02 nM, between 0.005 and 0.02 nM, or between 0.01 and 0.02 nM. In some embodiments, the iRNA (e.g., dsRNA) has an IC₅₀ in the range of 0.01-1 nM.

[0117] In some embodiments, the cell (e.g., the hepatocyte) is a mammalian cell (e.g., a human, non-human primate, or rodent cell). In one embodiment, the subject is a mammal (e.g., a human) having a LECT2 amyloidosis. In one embodiment, the dsRNA introduced reduces or inhibits expression of a LECT2 gene in the cell.

[0118] In one embodiment, the dsRNA inhibits expression of a LECT2 gene, or inhibits amyloid deposition (e.g., by preventing amyloid deposition or reducing amyloid deposition, e.g., by reducing size, number, or extent of amyloid deposits). The inhibition optionally involves an inhibition of at least 5%, 10%, 15%, 20%, 25%, 30%, 35%, 40%, 45%, 50%, 55%, 60%, 65%, 70%, 75%, 80%, 85%, 90%, 95%, or more, compared to a reference, (e.g., a control that is untreated or treated with a non-targeting dsRNA (e.g., a dsRNA that does not target LECT2)).

[0119] In some embodiments, inhibiting expression of LECT2 gene decreases a LECT2 protein level in a biological sample (e.g., a serum sample) from the subject by at least 30%, 40%, 50%, 60%, 70%, 80%, 90%, or 95%.

[0120] In other aspects, the disclosure provides methods for treating pathological processes related to LECT2 expression (e.g., amyloid deposition). In one embodiment, the method includes administering to a subject, e.g., a patient in need of such treatment, an effective (e.g., a therapeutically or prophylactically effective) amount of a dsRNA provided herein.

[0121] In an aspect provided herein is a method of treating and/or preventing a disorder related to LECT2 expression (e.g., a LECT2 amyloidosis) comprising administering to a subject in need of such treatment a therapeutically effective amount of an iRNA (e.g., a dsRNA) described herein, or a composition comprising an iRNA (e.g., a dsRNA) described herein.

[0122] In an aspect provided herein is a method of treating a disorder related to LECT2 expression (e.g., LECT2 amyloidosis) comprising administering to a subject in need of such treatment a double-stranded ribonucleic acid (dsRNA), wherein said dsRNA comprises a sense strand and an antisense strand 15-30 base pairs in length and the antisense strand is complementary to at least 15 contiguous nucleotides of a LECT2 mRNA transcript, e.g., a human LECT2 mRNA transcript, e.g., SEQ ID NO: 1 or a nucleotide sequence having a A to G substitution at nucleotide position 373 of SEQ ID NO: 1. In one embodiment, the iRNA (e.g., dsRNA) targets mRNA that encodes valine at position 40 in the mature LECT2 protein (or amino acid 58 in the unprocessed protein).

[0123] In one embodiment provided herein is a method of treating a subject having a LECT2 amyloidosis, the method comprising administering to the subject a double-stranded ribonucleic acid (dsRNA), wherein said dsRNA comprises a sense strand and an antisense strand 15-30 base pairs in length and the antisense strand is complementary to at least 15 contiguous nucleotides of a LECT2 mRNA transcript, e.g., a human LECT2 mRNA transcript, e.g., SEQ ID NO: 1 or a nucleotide sequence having a A to G substitution at nucleotide position 373 of SEQ ID NO: 1. In one embodiment, the iRNA (e.g., dsRNA) targets mRNA that encodes valine at position 40 in the mature LECT2 protein (or amino acid 58 in the unprocessed protein).

[0124] In some embodiments, administration of the iRNA targeting LECT2 alleviates or relieves the severity of at least one symptom of a disorder related to LECT2 expression in the patient. In some embodiments, at least one sign or symptom of a disorder related to LECT2 expression, e.g., an amyloidosis, e.g., LECT2 amyloidosis, comprises a measure of amyloid deposits or presence or level of LECT2 (e.g., LECT2 gene, LECT2 mRNA, or LECT2 protein)).

[0125] In one embodiment, subject has a LECT2 amyloidosis. In another embodiment, the subject is at risk for developing a LECT2 amyloidosis.

[0126] In some embodiments, the subject is a human.

[0127] In some embodiments, the dsRNA or pharmaceutical composition, e.g., a dsRNA or pharmaceutical composition as described herein, is administered to the subject subcutaneously or intravenously.

[0128] In some embodiments, treating comprises prevention of progression of the disorder. In some embodiments, treating comprises inhibiting or reducing the expression or activity of LECT2 in a cell, e.g. a hepatocyte. In some embodiments, treating results in at least a 30%, 40%, 50%, 60%, 70%, 80%, 90%, or 95% mean reduction from baseline of LECT2 mRNA in the cell.

[0129] In some embodiments, the methods described herein further comprise measuring level of LECT2 (e.g., LECT2 gene, LECT2 mRNA, or LECT2 protein) in the subject. In some embodiments measuring the level of LECT2 in the subject comprises measuring the level of LECT2 gene, LECT2 protein or LECT2 mRNA in a biological sample from the subject (e.g., a tissue, blood, or serum sample). In some embodiments, the methods described herein further comprise performing a blood test, an imaging test, or a liver or kidney biopsy. In some embodiments, measuring level of LECT2 (e.g., LECT2 gene, LECT2 mRNA, or LECT2 protein) in the subject is performed prior to treatment with the dsRNA agent or the pharmaceutical composition. In some embodiments, upon determination that a subject has a level of LECT2 (e.g., LECT2 gene, LECT2 mRNA, or LECT2 protein) that is greater than a reference level, the dsRNA agent or the pharmaceutical composition is administered to the subject. In some embodiments, measuring the level of LECT2 (e.g., LECT2 gene, LECT2 mRNA, or LECT2 protein) in the subject is performed after treatment with the dsRNA agent or the pharmaceutical composition.

[0130] In some embodiments, the iRNA (e.g., dsRNA) is formulated as an LNP formulation.

[0131] In some embodiments, the iRNA (e.g., dsRNA) is in the form of a GalNAc conjugate.

[0132] In some embodiments, the iRNA (e.g., dsRNA) is administered at a dose of 0.05-50 mg/kg.

[0133] In some embodiments, the iRNA (e.g., dsRNA) is administered at a concentration of 0.01 mg/kg-5 mg/kg bodyweight of the subject.

[0134] In some embodiments, the iRNA (e.g., dsRNA) is formulated as an LNP formulation and is administered at a dose of 0.05-5 mg/kg. In some embodiments, the iRNA (e.g., dsRNA) is formulated as an LNP formulation and is administered at a dose of 0.1 to 0.5 mg/kg.

[0135] In some embodiments, the iRNA (e.g., dsRNA) is in the form of a GalNAc conjugate and is administered at a dose of 0.5-50 mg/kg. In some embodiments, the iRNA (e.g., dsRNA) is in the form of a GalNAc conjugate and is administered at a dose of 1 to 10 mg/kg.

[0136] In some embodiments, the method inhibits expression of a LECT2 gene, or inhibits amyloid deposition (e.g., by preventing amyloid deposition or reducing amyloid deposition, e.g., by reducing size, number, or extent of amyloid deposits). The inhibition optionally involves an inhibition of at least 5%, 10%, 15%, 20%, 25%, 30%, 35%, 40%, 45%, 50%, 55%, 60%, 65%, 70%, 75%, 80%, 85%, 90%, or 95%, compared to a reference (e.g., a control that is untreated or treated with a non-targeting dsRNA (e.g., a dsRNA that does not target LECT2)).

[0137] In some embodiments, the iRNA (e.g., dsRNA) has an IC₅₀ in the range of 0.0005-1 nM, e.g., between 0.001 and 0.2 nM, between 0.002 and 0.1 nM, between 0.005 and 0.075 nM, or between 0.01 and 0.05 nM. In some embodiments, the iRNA (e.g., dsRNA) has an IC₅₀ equal to or less than 0.02 nM, e.g., between 0.0005 and 0.02 nM, between 0.001 and 0.02 nM, between 0.005 and 0.02 nM, or between 0.01 and 0.02 nM. In some embodiments, the iRNA (e.g., dsRNA) has an IC₅₀ in the range of 0.01-1 nM.

[0138] In some embodiments, a method described herein ameliorates a symptom associated with a LECT2 related disorder (e.g., a LECT2 amyloidosis). In some embodiments, a method described herein inhibits expression of a LECT2 gene in the subject. In some embodiments, a method described herein inhibits amyloid deposition (e.g., by preventing amyloid deposition or reducing amyloid deposition, e.g., by reducing size, number, or extent of amyloid deposits).

[0139] In some embodiments, the iRNA (e.g., dsRNA) or composition comprising the iRNA is administered according to a dosing regimen. In some embodiments, the iRNA (e.g., dsRNA) or composition comprising the iRNA is administered repeatedly, e.g., according to a dosing regimen.

[0140] In some embodiments, the iRNA (e.g., dsRNA) or composition comprising the iRNA is administered subcutaneously. In some embodiments, the iRNA is in the form of a GalNAc conjugate. In some embodiments, the iRNA (e.g., the dsRNA) is administered at a dose of 0.5-50 mg/kg. In some embodiments, the iRNA (e.g., dsRNA) is in the form of a GalNAc conjugate and is administered at a dose of 1 to 10 mg/kg.

[0141] In an aspect provided herein is a vector encoding at least one strand of an iRNA (e.g., a dsRNA) as described herein.

[0142] In an aspect provided herein is a vector encoding at least one strand of a dsRNA, wherein said dsRNA comprises a region of complementarity to at least a part of an mRNA encoding LECT2, wherein said dsRNA is 30 base pairs or less in length, and wherein said dsRNA targets said mRNA for cleavage.

[0143] In some embodiments, the region of complementarity is at least 15 nucleotides in length. In some embodiments, the region of complementarity is 19 to 23 nucleotides in length. In some embodiments, the region of complementarity is 21 to 23 nucleotides in length.

[0144] In one aspect, a vector is provided for inhibiting the expression of a LECT2 gene in a cell. In one embodiment, the vector comprises an iRNA as described herein. In one embodiment, the vector includes at least one regulatory sequence operably linked to a nucleotide sequence that encodes at least one strand of an iRNA as described herein. In one embodiment the vector comprises at least one strand of a LECT2 iRNA.

[0145] In an aspect provided herein is a cell comprising a vector as described herein.

[0146] In an aspect provided herein is a cell containing a vector for inhibiting the expression of a LECT2 gene in a cell. The vector includes a regulatory sequence operably linked to a nucleotide sequence that encodes at least one strand of an iRNA described herein.

[0147] All publications, patent applications, patents, and other references mentioned herein are incorporated by reference in their entirety.

[0148] The details of various embodiments of the disclosure are set forth in the description below. Other features, objects, and advantages of the disclosure will be apparent from the description and the drawings, and from the claims.

### BRIEF DESCRIPTION OF THE DRAWINGS

[0149] The patent or application file contains at least one drawing executed in color. Copies of this patent or patent application publication with color drawing(s) will be provided by the Office upon request and payment of the necessary fee.

[0150] FIG. 1 depicts a human LECT2 mRNA transcript sequence (Ref. Seq. NM_002302.2 GI:59806344, record dated Apr. 17, 2013; SEQ ID NO: 1).

[0151] FIG. 2 depicts the sequences and chemistry of three exemplary LECT2 siRNAs: AD-454781, AD-133461, and AD-454746, which were designed to target regions of the LECT2 mRNA in both humans and cynomolgus monkeys. For each siRNA, “F” which is shown in green is the “2′fluoro” modification, OMe shown in black is a methoxy group, GNA shown in purple is a glycol nucleic acid, and PS refers to the phosphonothioate linkage. FIG. 2 discloses SEQ ID NOS 897-902, respectively, in order of appearance.

[0152] FIG. 3 depicts the pharmacodynamics of the three exemplary LECT2 siRNAs in rodent AAV models. Relative levels of LECT2 mRNA in the liver and circulating LECT2 protein in the plasma (percent remaining) were quantified on day 14 post-treatment in the experimental (LECT2 siRNAs) and control (PBS) groups.

[0153] FIGS. 4A-4C show the dose-response of the three exemplary LECT2 siRNAs in suppressing LECT2 in cynomolgus monkeys relative to a PBS control. Relative levels of plasma LECT2 (plasma LECT2 protein knockdown) were quantified by normalization to pre-treatment protein levels for each individual monkey.

[0154] FIGS. 5A-5B depict the relative levels of rat (FIG. 5A) or mouse (FIG. 5B) LECT2 mRNA in the liver (expression fold difference) at 3, 6, or 12 months post-initial treatment in the experimental (LECT2 siRNAs) or control (PBS) groups.

[0155] FIGS. 6A-6B assess long term LECT-2 knockdown in cynomolgus monkeys. In FIG. 6A, relative levels of LECT2 mRNA (expression fold difference) in the livers of monkeys at six months post-initial treatment were quantified in the experimental (siRNA AD-81725) and control (PBS) groups. In FIG. 6B, relative, circulating levels of LECT2 plasma protein (percent protein remaining) were measured pre-treatment and each month for six months post-first dosing of the experimental (siRNA AD-81725) and control (PBS) groups.

### DETAILED DESCRIPTION

[0156] iRNA directs the sequence-specific degradation of mRNA through a process known as RNA interference (RNAi). Described herein are iRNAs and methods of using them for modulating (e.g., inhibiting) the expression of a LECT2 gene. Also provided are compositions and methods for treatment of disorders related to LECT2 expression, such as amyloidosis (e.g., LECT2 amyloidosis).

[0157] The iRNAs of the compositions featured herein include an RNA strand (the antisense strand) having a region which is 30 nucleotides or less in length, i.e., 15-30 nucleotides in length, generally 19-24 nucleotides in length, which region is substantially complementary to at least part of an mRNA transcript of a LECT2 gene (also referred to herein as an “LECT2-specific iRNA”). The use of such an iRNA enables the targeted degradation of mRNAs of genes that are implicated in disorders related to LECT2 expression, as described herein. Very low dosages of LECT2-specific iRNAs can specifically and efficiently mediate RNAi, resulting in significant inhibition of expression of a LECT2 gene. iRNAs targeting LECT2 can specifically and efficiently mediate RNAi, resulting in significant inhibition of expression of a LECT2 gene, which can be assessed, e.g., in cell-based assays.

[0158] The following description discloses how to make and use compositions containing iRNAs to modulate (e.g., inhibit) the expression of a LECT2 gene, as well as compositions and methods for treating disorders related to expression of a LECT2 gene.

[0159] Embodiments of the pharmaceutical compositions featured herein include an iRNA having an antisense strand comprising a region which is 30 nucleotides or less in length, generally 19-24 nucleotides in length, which region is substantially complementary to at least part of an RNA transcript of a LECT2 gene.

[0160] In some aspects, pharmaceutical compositions containing a LECT2 iRNA and a pharmaceutically acceptable carrier, methods of using the compositions to inhibit expression of a LECT2 gene, and methods of using the pharmaceutical compositions to treat disorders related to expression of a LECT2 gene (e.g., LECT2 amyloidosis) are featured herein.

### I. Definitions

[0161] For convenience, the meaning of certain terms and phrases used in the specification, examples, and appended claims, are provided below. If there is an apparent discrepancy between the usage of a term in other parts of this specification and its definition provided in this section, the definition in this section shall prevail.

[0162] As used herein, “LECT2” refers to leukocyte chemotactic factor 2 (also known as leukocyte cell-derived chemotaxin 2, chondromodulin-II, chm-II or chm2). See, e.g., Yamagoe S et al. Genomics, 1998 Mar. 15; 48(3):324-9. LECT2 was first identified as a novel neutrophil chemotactic protein and is identical with chondromodulin II, a growth stimulator for chondrocytes and osteoblasts. The human LECT2 gene was mapped to chromosome 5q31.1-q32. Ibid.

[0163] The sequence of a human LECT2 mRNA transcript can be found at NM_002302.2 (SEQ ID NO: 1). The sequence of a mouse LECT2 mRNA can be found at NM_010702.1 and at NM_010702.2, and the sequence of a rat LECT2 mRNA can be found at NM_001108405.1.

[0164] The human LECT2 protein is a secreted, 16 kDa protein. The LECT2 protein is secreted by the liver. It has high sequence similarity to the chondromodulin repeat regions of the chicken myb-induced myeloid 1 protein (www.genecards.org/cgi-bin/carddisp.pl?gene=LECT2; accessed Aug. 29, 2013). Polymorphism in the LECT2 gene has been associated with rheumatoid arthritis. Ibid.

[0165] LECT2 is expressed in various tissues, including the brain and stomach as well as the liver. Koshimizu, Y & Ohtomi, M. (2010) Brain Res. 1311:1-11. In a study using indirect immuno-peroxidase staining to investigate the expression of LECT2 in normal and diseased human organs and tissues other than liver, it was found that LECT2 was generally expressed in vascular, endothelial and smooth muscle cells, adipocytes, cerebral nerve cells, apical squamous epithelia, parathyroid cells, sweat and sebaceous glandular epithelia, Hassall bodies and some mononuclear cells in immuno-hematopoietic tissue. This protein was generally negative, although occasionally positively stained in osteoblasts, chondrocytes, cardiac and skeletal muscle cells, smooth muscle cells of the gastrointestinal tract, and the epithelial cells of some tissues. Nagai et al. (1998) Pathol Int. 48(11):882-6.

[0166] The human LECT2 gene codes for 151 amino acids including an 18 amino acid signal peptide. The secreted protein has 133 residues. A G/A polymorphism at nucleotide 172 in exon 3 of the gene (codon change GTC to ATC) has been identified and accounts for the presence of either valine or isoleucine at position 58 of the unprocessed protein (or position 40 of the mature protein). The G allele has an overall frequency of 0.477 and a frequency range of 0.6-0.7 in individuals of European descent. See Benson, M. D. et al. (2008) Kidney International, 74: 218-222; Murphy, C. L. et al. (2010) Am J Kidney Dis, 56(6):1100-1107. Patients with LECT2 amyloidosis typically are homozygous for the G allele. Without wishing to be bound by theory, it has been suggested that replacement of the buried isoleucine (A allele) side chain with valine (G allele) could destabilize the protein and possibly account for the amyloidogenic propensity of this LECT2 variant. Murphy, C. L. et al. (2010) Am J Kidney Dis, 56(6):1100-1107.

[0167] As used herein, a “LECT2 amyloidosis” or “ALECT2” includes an amyloidosis involving deposits of amyloid or amyloid fibrils that contain a LECT2 protein (e.g., any polymorphic variant of a LECT2 protein) or a portion of a LECT2 protein. The LECT2 protein can be a variant (e.g., a mutant) LECT2 protein. The amyloidosis can be systemic or local. In some embodiments, the LECT2 amyloidosis involves amyloid deposits in the kidney and/or liver.

[0168] “G,” “C,” “A,” “T” and “U” each generally stand for a nucleotide that contains guanine, cytosine, adenine, thymidine and uracil as a base, respectively. However, it will be understood that the term “ribonucleotide” or “nucleotide” can also refer to a modified nucleotide, as further detailed below, or a surrogate replacement moiety. The skilled person is well aware that guanine, cytosine, adenine, and uracil may be replaced by other moieties without substantially altering the base pairing properties of an oligonucleotide comprising a nucleotide bearing such replacement moiety. For example, without limitation, a nucleotide comprising inosine as its base may base pair with nucleotides containing adenine, cytosine, or uracil. Hence, nucleotides containing uracil, guanine, or adenine may be replaced in the nucleotide sequences of dsRNA featured in the disclosure by a nucleotide containing, for example, inosine. In another example, adenine and cytosine anywhere in the oligonucleotide can be replaced with guanine and uracil, respectively to form G-U Wobble base pairing with the target mRNA. Sequences containing such replacement moieties are suitable for the compositions and methods featured in the disclosure.

[0169] As used herein, the term “iRNA,” “RNAi”, “iRNA agent,” or “RNAi agent” refers to an agent that contains RNA as that term is defined herein, and which mediates the targeted cleavage of an RNA transcript, e.g., via an RNA-induced silencing complex (RISC) pathway. In one embodiment, an iRNA as described herein effects inhibition of LECT2 expression. Inhibition of ALECT2 expression may be assessed based on a reduction in the level of ALECT2 mRNA or a reduction in the level of the ALECT2 protein. As used herein, “target sequence” refers to a contiguous portion of the nucleotide sequence of an mRNA molecule formed during the transcription of an ALECT2 gene, including mRNA that is a product of RNA processing of a primary transcription product. The target portion of the sequence will be at least long enough to serve as a substrate for iRNA-directed cleavage at or near that portion. For example, the target sequence will generally be from 9-36 nucleotides in length, e.g., 15-30 nucleotides in length, including all sub-ranges therebetween. As non-limiting examples, the target sequence can be from 15-30 nucleotides, 15-26 nucleotides, 15-23 nucleotides, 15-22 nucleotides, 15-21 nucleotides, 15-20 nucleotides, 15-19 nucleotides, 15-18 nucleotides, 15-17 nucleotides, 18-30 nucleotides, 18-26 nucleotides, 18-23 nucleotides, 18-22 nucleotides, 18-21 nucleotides, 18-20 nucleotides, 19-30 nucleotides, 19-26 nucleotides, 19-23 nucleotides, 19-22 nucleotides, 19-21 nucleotides, 19-20 nucleotides, 20-30 nucleotides, 20-26 nucleotides, 20-25 nucleotides, 20-24 nucleotides, 20-23 nucleotides, 20-22 nucleotides, 20-21 nucleotides, 21-30 nucleotides, 21-26 nucleotides, 21-25 nucleotides, 21-24 nucleotides, 21-23 nucleotides, or 21-22 nucleotides.

[0170] As used herein, the term “strand comprising a sequence” refers to an oligonucleotide comprising a chain of nucleotides that is described by the sequence referred to using the standard nucleotide nomenclature.

[0171] As used herein, and unless otherwise indicated, the term “complementary,” when used to describe a first nucleotide sequence in relation to a second nucleotide sequence, refers to the ability of an oligonucleotide or polynucleotide comprising the first nucleotide sequence to hybridize and form a duplex structure under certain conditions with an oligonucleotide or polynucleotide comprising the second nucleotide sequence, as will be understood by the skilled person. Such conditions can, for example, be stringent conditions, where stringent conditions may include: 400 mM NaCl, 40 mM PIPES pH 6.4, 1 mM EDTA, 50° C. or 70° C. for 12-16 hours followed by washing. Other conditions, such as physiologically relevant conditions as may be encountered inside an organism, can apply. The skilled person will be able to determine the set of conditions most appropriate for a test of complementarity of two sequences in accordance with the ultimate application of the hybridized nucleotides.

[0172] Complementary sequences within an iRNA, e.g., within a dsRNA as described herein, include base-pairing of the oligonucleotide or polynucleotide comprising a first nucleotide sequence to an oligonucleotide or polynucleotide comprising a second nucleotide sequence over the entire length of one or both nucleotide sequences. Such sequences can be referred to as “fully complementary” with respect to each other herein. However, where a first sequence is referred to as “substantially complementary” with respect to a second sequence herein, the two sequences can be fully complementary, or they may form one or more, but generally not more than 5, 4, 3 or 2 mismatched base pairs upon hybridization for a duplex up to 30 base pairs, while retaining the ability to hybridize under the conditions most relevant to their ultimate application, e.g., inhibition of gene expression via a RISC pathway. However, where two oligonucleotides are designed to form, upon hybridization, one or more single stranded overhangs, such overhangs shall not be regarded as mismatches with regard to the determination of complementarity. For example, a dsRNA comprising one oligonucleotide 21 nucleotides in length and another oligonucleotide 23 nucleotides in length, wherein the longer oligonucleotide comprises a sequence of 21 nucleotides that is fully complementary to the shorter oligonucleotide, may yet be referred to as “fully complementary” for the purposes described herein.

[0173] “Complementary” sequences, as used herein, may also include, or be formed entirely from, non-Watson-Crick base pairs and/or base pairs formed from non-natural and modified nucleotides, in as far as the above requirements with respect to their ability to hybridize are fulfilled. Such non-Watson-Crick base pairs includes, but are not limited to, G:U Wobble or Hoogstein base pairing.

[0174] The terms “complementary,” “fully complementary” and “substantially complementary” herein may be used with respect to the base matching between the sense strand and the antisense strand of a dsRNA, or between the antisense strand of an iRNA agent and a target sequence, as will be understood from the context of their use.

[0175] As used herein, a polynucleotide that is “substantially complementary to at least part of” a messenger RNA (mRNA) refers to a polynucleotide that is substantially complementary to a contiguous portion of the mRNA of interest (e.g., an mRNA encoding an ALECT2 protein). For example, a polynucleotide is complementary to at least a part of a LECT2 mRNA if the sequence is substantially complementary to a non-interrupted portion of an mRNA encoding LECT2. As another example, a polynucleotide is complementary to at least a part of a LECT2 mRNA if the sequence is substantially complementary to a non-interrupted portion of an mRNA encoding LECT2.

[0176] The term “double-stranded RNA” or “dsRNA,” as used herein, refers to an iRNA that includes an RNA molecule or complex of molecules having a hybridized duplex region that comprises two anti-parallel and substantially complementary nucleic acid strands, which will be referred to as having “sense” and “antisense” orientations with respect to a target RNA. The duplex region can be of any length that permits specific degradation of a desired target RNA, e.g., through a RISC pathway, but will typically range from 9 to 36 base pairs in length, e.g., 15-30 base pairs in length. Considering a duplex between 9 and 36 base pairs, the duplex can be any length in this range, for example, 9, 10, 11, 12, 13, 14, 15, 16, 17, 18, 19, 20, 21, 22, 23, 24, 25, 26, 27, 28, 29, 30, 31, 32, 33, 34, 35, or 36 and any sub-range therein between, including, but not limited to 15-30 base pairs, 15-26 base pairs, 15-23 base pairs, 15-22 base pairs, 15-21 base pairs, 15-20 base pairs, 15-19 base pairs, 15-18 base pairs, 15-17 base pairs, 18-30 base pairs, 18-26 base pairs, 18-23 base pairs, 18-22 base pairs, 18-21 base pairs, 18-20 base pairs, 19-30 base pairs, 19-26 base pairs, 19-23 base pairs, 19-22 base pairs, 19-21 base pairs, 19-20 base pairs, 20-30 base pairs, 20-26 base pairs, 20-25 base pairs, 20-24 base pairs, 20-23 base pairs, 20-22 base pairs, 20-21 base pairs, 21-30 base pairs, 21-26 base pairs, 21-25 base pairs, 21-24 base pairs, 21-23 base pairs, or 21-22 base pairs. dsRNAs generated in the cell by processing with Dicer and similar enzymes are generally in the range of 19-22 base pairs in length. One strand of the duplex region of a dsDNA comprises a sequence that is substantially complementary to a region of a target RNA. The two strands forming the duplex structure can be from a single RNA molecule having at least one self-complementary region, or can be formed from two or more separate RNA molecules. Where the duplex region is formed from two strands of a single molecule, the molecule can have a duplex region separated by a single stranded chain of nucleotides (herein referred to as a “hairpin loop”) between the 3′-end of one strand and the 5′-end of the respective other strand forming the duplex structure. The hairpin loop can comprise at least one unpaired nucleotide; in some embodiments the hairpin loop can comprise at least 3, at least 4, at least 5, at least 6, at least 7, at least 8, at least 9, at least 10, at least 20, at least 23 or more unpaired nucleotides. Where the two substantially complementary strands of a dsRNA are comprised by separate RNA molecules, those molecules need not, but can be covalently connected. Where the two strands are connected covalently by means other than a hairpin loop, the connecting structure is referred to as a “linker.” The term “siRNA” is also used herein to refer to a dsRNA as described above.

[0177] In another embodiment, the iRNA agent may be a “single-stranded siRNA” that is introduced into a cell or organism to inhibit a target mRNA. Single-stranded RNAi agents bind to the RISC endonuclease Argonaute 2, which then cleaves the target mRNA. The single-stranded siRNAs are generally 15-30 nucleotides and are chemically modified. The design and testing of single-stranded siRNAs are described in U.S. Pat. No. 8,101,348 and in Lima et al., (2012) Cell 150: 883-894, the entire contents of each of which are hereby incorporated herein by reference. Any of the antisense nucleotide sequences described herein (e.g., sequences provided in Tables 2A-2B, 3A-3B, 6 or 7) may be used as a single-stranded siRNA as described herein or as chemically modified by the methods described in Lima et al., (2012) Cell 150:883-894.

[0178] The skilled artisan will recognize that the term “RNA molecule” or “ribonucleic acid molecule” encompasses not only RNA molecules as expressed or found in nature, but also analogs and derivatives of RNA comprising one or more ribonucleotide/ribonucleoside analogs or derivatives as described herein or as known in the art. Strictly speaking, a “ribonucleoside” includes a nucleoside base and a ribose sugar, and a “ribonucleotide” is a ribonucleoside with one, two or three phosphate moieties. However, the terms “ribonucleoside” and “ribonucleotide” can be considered to be equivalent as used herein. The RNA can be modified in the nucleobase structure, in the ribose structure, or in the ribose-phosphate backbone structure, e.g., as described herein below. However, the molecules comprising ribonucleoside analogs or derivatives must retain the ability to form a duplex. As non-limiting examples, an RNA molecule can also include at least one modified ribonucleoside including but not limited to a 2′-O-methyl modified nucleoside, a nucleoside comprising a 5′ phosphorothioate group, a terminal nucleoside linked to a cholesteryl derivative or dodecanoic acid bisdecylamide group, a locked nucleoside, an abasic nucleoside, an acyclic nucleoside, a glycol nucleotide, a 2′-deoxy-2′-fluoro modified nucleoside, a 2′-amino-modified nucleoside, 2′-alkyl-modified nucleoside, morpholino nucleoside, a phosphoramidate or a non-natural base comprising nucleoside, or any combination thereof. Alternatively, an RNA molecule can comprise at least two modified ribonucleosides, at least 3, at least 4, at least 5, at least 6, at least 7, at least 8, at least 9, at least 10, at least 15, at least 20 or more, up to the entire length of the dsRNA molecule. The modifications need not be the same for each of such a plurality of modified ribonucleosides in an RNA molecule. In one embodiment, modified RNAs contemplated for use in methods and compositions described herein are peptide nucleic acids (PNAs) that have the ability to form the required duplex structure and that permit or mediate the specific degradation of a target RNA, e.g., via a RISC pathway.

[0179] In one aspect, a modified ribonucleoside includes a deoxyribonucleoside. In such an instance, an iRNA agent can comprise one or more deoxynucleosides, including, for example, a deoxynucleoside overhang(s), or one or more deoxynucleosides within the double stranded portion of a dsRNA. In certain embodiments, the RNA molecule comprises a percentage of deoxyribonucleosides of at least 5, 10, 15, 20, 25, 30, 35, 40, 45, 50, 55, 60, 65, 70, 75, 80, 85, 90, 95% or higher (but not 100%) deoxyribonucleosides, e.g., in one or both strands. In other embodiments, the term “iRNA” does not encompass a double stranded DNA molecule (e.g., a naturally-occurring double stranded DNA molecule or a 100% deoxynucleoside-containing DNA molecule).

[0180] In one aspect, an RNA interference agent includes a single stranded RNA that interacts with a target RNA sequence to direct the cleavage of the target RNA. Without wishing to be bound by theory, long double stranded RNA introduced into cells is broken down into siRNA by a Type III endonuclease known as Dicer (Sharp et al., Genes Dev. 2001, 15:485). Dicer, a ribonuclease-III-like enzyme, processes the dsRNA into 19-23 base pair short interfering RNAs with characteristic two base 3′ overhangs (Bernstein, et al., (2001) Nature 409:363). The siRNAs are then incorporated into an RNA-induced silencing complex (RISC) where one or more helicases unwind the siRNA duplex, enabling the complementary antisense strand to guide target recognition (Nykanen, et al., (2001) Cell 107:309). Upon binding to the appropriate target mRNA, one or more endonucleases within the RISC cleaves the target to induce silencing (Elbashir, et al., (2001) Genes Dev. 15:188). Thus, in one aspect the disclosure relates to a single stranded RNA that promotes the formation of a RISC complex to effect silencing of the target gene.

[0181] As used herein, the term “nucleotide overhang” refers to at least one unpaired nucleotide that protrudes from the duplex structure of an iRNA, e.g., a dsRNA. For example, when a 3′-end of one strand of a dsRNA extends beyond the 5′-end of the other strand, or vice versa, there is a nucleotide overhang. A dsRNA can comprise an overhang of at least one nucleotide; alternatively the overhang can comprise at least two nucleotides, at least three nucleotides, at least four nucleotides, at least five nucleotides or more. A nucleotide overhang can comprise or consist of a nucleotide/nucleoside analog, including a deoxynucleotide/nucleoside. The overhang(s) may be on the sense strand, the antisense strand or any combination thereof. Furthermore, the nucleotide(s) of an overhang can be present on the 5′ end, 3′ end or both ends of either an antisense or sense strand of a dsRNA.

[0182] In one embodiment, the antisense strand of a dsRNA has a 1-10 nucleotide overhang at the 3′ end and/or the 5′ end. In one embodiment, the sense strand of a dsRNA has a 1-10 nucleotide overhang at the 3′ end and/or the 5′ end. In another embodiment, one or more of the nucleotides in the overhang is replaced with a nucleoside thiophosphate.

[0183] The terms “blunt” or “blunt ended” as used herein in reference to a dsRNA mean that there are no unpaired nucleotides or nucleotide analogs at a given terminal end of a dsRNA, i.e., no nucleotide overhang. One or both ends of a dsRNA can be blunt. Where both ends of a dsRNA are blunt, the dsRNA is said to be blunt ended. To be clear, a “blunt ended” dsRNA is a dsRNA that is blunt at both ends, i.e., no nucleotide overhang at either end of the molecule. Most often such a molecule will be double-stranded over its entire length.

[0184] The term “antisense strand” or “guide strand” refers to the strand of an iRNA, e.g., a dsRNA, which includes a region that is substantially complementary to a target sequence. As used herein, the term “region of complementarity” refers to the region on the antisense strand that is substantially complementary to a sequence, for example a target sequence, as defined herein. Where the region of complementarity is not fully complementary to the target sequence, the mismatches may be in the internal or terminal regions of the molecule. In some embodiments, the region of complementarity comprises 0, 1, or 2 mismatches.

[0185] The term “sense strand” or “passenger strand” as used herein, refers to the strand of an iRNA that includes a region that is substantially complementary to a region of the antisense strand as that term is defined herein.

[0186] As used herein, the term “SNALP” refers to a stable nucleic acid-lipid particle. A SNALP represents a vesicle of lipids coating a reduced aqueous interior comprising a nucleic acid such as an iRNA or a plasmid from which an iRNA is transcribed. SNALPs are described, e.g., in U.S. Patent Application Publication Nos. 2006/0240093, 2007/0135372, and in International Application No. WO 2009/082817. These applications are incorporated herein by reference in their entirety.

[0187] “Introducing into a cell,” when referring to an iRNA, means facilitating or effecting uptake or absorption into the cell, as is understood by those skilled in the art. Absorption or uptake of an iRNA can occur through unaided diffusive or active cellular processes, or by auxiliary agents or devices. The meaning of this term is not limited to cells in vitro; an iRNA may also be “introduced into a cell,” wherein the cell is part of a living organism. In such an instance, introduction into the cell will include the delivery to the organism. For example, for in vivo delivery, iRNA can be injected into a tissue site or administered systemically. In vivo delivery can also be by a β-glucan delivery system, such as those described in U.S. Pat. Nos. 5,032,401 and 5,607,677, and U.S. Publication No. 2005/0281781, which are hereby incorporated by reference in their entirety. In vitro introduction into a cell includes methods known in the art such as electroporation and lipofection. Further approaches are described herein below or known in the art.

[0188] As used herein, the term “modulate the expression of,” refers to at an least partial “inhibition” or partial “activation” of a LECT2 gene expression in a cell treated with an iRNA composition as described herein compared to the expression of LECT2 in a control cell. A control cell includes an untreated cell, or a cell treated with a non-targeting control iRNA.

[0189] The terms “activate,” “enhance,” “up-regulate the expression of,” “increase the expression of,” and the like, in so far as they refer to a LECT2 gene, herein refer to the at least partial activation of the expression of a LECT2 gene, as manifested by an increase in the amount of LECT2 mRNA, which may be isolated from or detected in a first cell or group of cells in which a LECT2 gene is transcribed and which has or have been treated such that the expression of a LECT2 gene is increased, as compared to a second cell or group of cells substantially identical to the first cell or group of cells but which has or have not been so treated (control cells).

[0190] In one embodiment, expression of a LECT2 gene is activated by at least about 10%, 15%, 20%, 25%, 30%, 35%, 40%, 45%, or 50% by administration of an iRNA as described herein. In some embodiments, a LECT2 gene is activated by at least about 60%, 70%, or 80% by administration of an iRNA featured in the disclosure. In some embodiments, expression of a LECT2 gene is activated by at least about 85%, 90%, or 95% or more by administration of an iRNA as described herein. In some embodiments, the LECT2 gene expression is increased by at least 1-fold, at least 2-fold, at least 5-fold, at least 10-fold, at least 50-fold, at least 100-fold, at least 500-fold, at least 1000-fold or more in cells treated with an iRNA as described herein compared to the expression in an untreated cell. Activation of expression by small dsRNAs is described, for example, in Li et al., 2006 Proc. Natl. Acad. Sci. U.S.A. 103:17337-42, and in US2007/0111963 and US2005/226848, each of which is incorporated herein by reference.

[0191] The terms “silence,” “inhibit expression of,” “down-regulate expression of,” “suppress expression of,” and the like, in so far as they refer to a LECT2 gene, herein refer to the at least partial suppression of the expression of a LECT2 gene, as assessed, e.g., based on LECT2 mRNA expression, LECT2 protein expression, or another parameter functionally linked to LECT2 gene expression. For example, inhibition of LECT2 expression may be manifested by a reduction of the amount of LECT2 mRNA which may be isolated from or detected in a first cell or group of cells in which a LECT2 gene is transcribed and which has or have been treated such that the expression of a LECT2 gene is inhibited, as compared to a control. The control may be a second cell or group of cells substantially identical to the first cell or group of cells, except that the second cell or group of cells have not been so treated (control cells). The degree of inhibition is usually expressed as a percentage of a control level, e.g.,

$$\frac{( mRNA in control cells ) - ( mRNA in treated cells )}{( mRNA in control cells )} 100 \%$$

[0192] Alternatively, the degree of inhibition may be given in terms of a reduction of a parameter that is functionally linked to LECT2 gene expression, e.g., the amount of protein encoded by a LECT2 gene. The reduction of a parameter functionally linked to LECT2 gene expression may similarly be expressed as a percentage of a control level. In principle, LECT2 gene silencing may be determined in any cell expressing LECT2, either constitutively or by genomic engineering, and by any appropriate assay.

[0193] For example, in certain instances, expression of a LECT2 gene is suppressed by at least about 10%, 15%, 20%, 25%, 30%, 35%, 40%, 45%, or 50% by administration of an iRNA disclosed herein. In some embodiments, a LECT2 gene is suppressed by at least about 60%, 65%, 70%, 75%, or 80% by administration of an iRNA disclosed herein. In some embodiments, a LECT2 gene is suppressed by at least about 85%, 90%, 95%, 98%, 99%, or more by administration of an iRNA as described herein.

[0194] In the context of the present disclosure, the terms “treat,” “treatment,” and the like mean to prevent, relieve or alleviate at least one symptom associated with a disorder related to LECT2 expression, or to slow or reverse the progression or anticipated progression of such a disorder. For example, the methods featured herein, when employed to treat a LECT2 amyloidosis, may serve to inhibit amyloid deposition, to reduce or prevent one or more symptoms of the amyloidosis, or to reduce the risk or severity of associated conditions (e.g., nephrotic syndrome or hepatitis). Thus, unless the context clearly indicates otherwise, the terms “treat,” “treatment,” and the like are intended to encompass prophylaxis, e.g., prevention of disorders and/or symptoms of disorders related to LECT2 expression.

[0195] By “lower” in the context of a disease marker or symptom is meant any decrease, e.g., a statistically or clinically significant decrease in such level. The decrease can be, for example, at least 10%, at least 20%, at least 30%, at least 40%, at least 40%, at least 50%, at least 60%, at least 70%, at least 80%, or at least 90%. The decrease can be down to a level accepted as within the range of normal for an individual without such disorder.

[0196] As used herein, the phrases “therapeutically effective amount” and “prophylactically effective amount” and the like refer to an amount that provides a therapeutic benefit in the treatment, prevention, or management of any disorder or pathological process related to LECT2 expression. The specific amount that is therapeutically effective may vary depending on factors known in the art, such as, for example, the type of disorder or pathological process, the patient's history and age, the stage of the disorder or pathological process, and the administration of other therapies.

[0197] As used herein, a “pharmaceutical composition” comprises a pharmacologically effective amount of an iRNA and a pharmaceutically acceptable carrier. As used herein, “pharmacologically effective amount,” “therapeutically effective amount” or simply “effective amount” refers to that amount of an iRNA effective to produce the intended pharmacological, therapeutic or preventive result. For example, in a method of treating a disorder related to LECT2 expression (e.g., a LECT2 amyloidosis), an effective amount includes an amount effective to reduce one or more symptoms associated with the LECT2 amyloidosis, an amount effective to inhibit amyloid deposition (e.g., LECT2 amyloid deposition), or an amount effective to reduce the risk of developing conditions associated with LECT2 amyloidosis. For example, if a given clinical treatment is considered effective when there is at least a 10% reduction in a measurable parameter associated with a disease or disorder, a therapeutically effective amount of a drug for the treatment of that disease or disorder is the amount necessary to obtain at least a 10% reduction in that parameter. For example, a therapeutically effective amount of an iRNA targeting LECT2 can reduce a level of LECT2 mRNA or a level of LECT2 protein by any measurable amount, e.g., by at least 10%, 15%, 20%, 25%, 30%, 35%, 40%, 45%, 50%, 55%, 60%, 65%, 70%, 75%, 80%, 85%, 90%, or 95%.

[0198] The term “pharmaceutically acceptable carrier” refers to a carrier for administration of a therapeutic agent. Such carriers include, but are not limited to, saline, buffered saline, dextrose, water, glycerol, ethanol, and combinations thereof. The term specifically excludes cell culture medium. For drugs administered orally, pharmaceutically acceptable carriers include, but are not limited to pharmaceutically acceptable excipients such as inert diluents, disintegrating agents, binding agents, lubricating agents, sweetening agents, flavoring agents, coloring agents and preservatives. Suitable inert diluents include sodium and calcium carbonate, sodium and calcium phosphate, and lactose, while corn starch and alginic acid are suitable disintegrating agents. Binding agents may include starch and gelatin, while the lubricating agent, if present, will generally be magnesium stearate, stearic acid or talc. If desired, the tablets may be coated with a material such as glyceryl monostearate or glyceryl distearate, to delay absorption in the gastrointestinal tract. Agents included in drug formulations are described further herein below.

[0199] The term “about” when referring to a number or a numerical range means that the number or numerical range referred to is an approximation within experimental variability (or within statistical experimental error), and thus the number or numerical range may vary from, for example, between 1% and 15% of the stated number or numerical range.

### II. iRNA Agents

[0200] Described herein are iRNA agents that modulate (e.g., inhibit) the expression of a LECT2 gene.

[0201] In some embodiments, the iRNA agent activates the expression of a LECT2 gene in a cell or mammal.

[0202] In some embodiments, the iRNA agent includes double-stranded ribonucleic acid (dsRNA) molecules for inhibiting the expression of a LECT2 gene in a cell or in a subject (e.g., in a mammal, e.g., in a human), where the dsRNA includes an antisense strand having a region of complementarity which is complementary to at least a part of an mRNA formed in the expression of a LECT2 gene, and where the region of complementarity is 30 nucleotides or less in length, generally 19-24 nucleotides in length, and where the dsRNA, upon contact with a cell expressing the LECT2 gene, inhibits the expression of the LECT2 gene, e.g., by at least 10%, 20%, 30%, 40%, or 50%.

[0203] The modulation (e.g., inhibition) of expression of the LECT2 gene can be assayed by, for example, a PCR or branched DNA (bDNA)-based method, or by a protein-based method, such as by Western blot. Expression of a LECT2 gene in cell culture, such as in COS cells, HeLa cells, primary hepatocytes, HepG2 cells, primary cultured cells or in a biological sample from a subject can be assayed by measuring LECT2 mRNA levels, such as by bDNA or TaqMan assay, or by measuring protein levels, such as by immunofluorescence analysis, using, for example, Western Blotting or flow cytometric techniques.

[0204] A dsRNA includes two RNA strands that are sufficiently complementary to hybridize to form a duplex structure under conditions in which the dsRNA will be used. One strand of a dsRNA (the antisense strand) includes a region of complementarity that is substantially complementary, and generally fully complementary, to a target sequence, derived from the sequence of an mRNA formed during the expression of a LECT2 gene. The other strand (the sense strand) includes a region that is complementary to the antisense strand, such that the two strands hybridize and form a duplex structure when combined under suitable conditions. Generally, the duplex structure is between 15 and 30 inclusive, more generally between 18 and 25 inclusive, yet more generally between 19 and 24 inclusive, and most generally between 19 and 21 base pairs in length, inclusive. Similarly, the region of complementarity to the target sequence is between 15 and 30 inclusive, more generally between 18 and 25 inclusive, yet more generally between 19 and 24 inclusive, and most generally between 19 and 21 nucleotides in length, inclusive.

[0205] In some embodiments, the dsRNA is between 15 and 20 nucleotides in length, inclusive, and in other embodiments, the dsRNA is between 25 and 30 nucleotides in length, inclusive. As the ordinarily skilled person will recognize, the targeted region of an RNA targeted for cleavage will most often be part of a larger RNA molecule, often an mRNA molecule. Where relevant, a “part” of an mRNA target is a contiguous sequence of an mRNA target of sufficient length to be a substrate for RNAi-directed cleavage (i.e., cleavage through a RISC pathway). dsRNAs having duplexes as short as 9 base pairs can, under some circumstances, mediate RNAi-directed RNA cleavage. Most often a target will be at least 15 nucleotides in length, e.g., 15-30 nucleotides in length.

[0206] One of skill in the art will also recognize that the duplex region is a primary functional portion of a dsRNA, e.g., a duplex region of 9 to 36, e.g., 15-30 base pairs. Thus, in one embodiment, to the extent that it becomes processed to a functional duplex of e.g., 15-30 base pairs that targets a desired RNA for cleavage, an RNA molecule or complex of RNA molecules having a duplex region greater than 30 base pairs is a dsRNA. Thus, an ordinarily skilled artisan will recognize that in one embodiment, then, an miRNA is a dsRNA. In another embodiment, a dsRNA is not a naturally occurring miRNA. In another embodiment, an iRNA agent useful to target LECT2 expression is not generated in the target cell by cleavage of a larger dsRNA.

[0207] A dsRNA as described herein may further include one or more single-stranded nucleotide overhangs. The dsRNA can be synthesized by standard methods known in the art as further discussed below, e.g., by use of an automated DNA synthesizer, such as are commercially available from, for example, Biosearch, Applied Biosystems, Inc.

[0208] In one embodiment, a LECT2 gene is a human LECT2 gene. In another embodiment the LECT2 gene is a mouse or a rat LECT2 gene.

[0209] In specific embodiments, the dsRNA comprises a sense strand that comprises or consists of a sense sequence selected from the sense sequences provided in Tables 2A-2B, 3A-3B, 6, or 7, and an antisense strand that comprises or consists of an antisense sequence selected from the antisense sequences provided in Tables 2A-2B, 3A-3B, 6, or 7.

[0210] In one aspect, a dsRNA will include at least sense and antisense nucleotide sequences, whereby the sense strand is selected from the sequences provided in Tables 2A-2B, 3A-3B, 6, or 7, and the corresponding antisense strand is selected from the sequences provided in Tables 2A-2B, 3A-3B, 6, or 7.

[0211] In these aspects, one of the two sequences is complementary to the other of the two sequences, with one of the sequences being substantially complementary to a sequence of an mRNA generated by the expression of a LECT2 gene. As such, a dsRNA will include two oligonucleotides, where one oligonucleotide is described as the sense strand, and the second oligonucleotide is described as the corresponding antisense strand. As described elsewhere herein and as known in the art, the complementary sequences of a dsRNA can also be contained as self-complementary regions of a single nucleic acid molecule, as opposed to being on separate oligonucleotides.

[0212] The skilled person is well aware that dsRNAs having a duplex structure of between 20 and 23, but specifically 21, base pairs have been hailed as particularly effective in inducing RNA interference (Elbashir et al., EMBO 2001, 20:6877-6888). However, others have found that shorter or longer RNA duplex structures can be effective as well.

[0213] In the embodiments described above, by virtue of the nature of the oligonucleotide sequences provided in Tables 2A-2B, 3A-3B, 6, or 7, dsRNAs described herein can include at least one strand of a length of minimally 19 nucleotides. It can be reasonably expected that shorter duplexes having one of the sequences of Tables 2A-2B, 3A-3B, 6, or 7 minus only a few nucleotides on one or both ends will be similarly effective as compared to the dsRNAs described above.

[0214] In some embodiments, the dsRNA has a partial sequence of at least 15, 16, 17, 18, 19, 20, or more contiguous nucleotides from one of the sequences of Tables 2A-2B, 3A-3B, 6, or 7.

[0215] In some embodiments, the dsRNA has an antisense sequence that comprises at least 15, 16, 17, 18, or 19 contiguous nucleotides of an antisense sequence provided in Tables 2A-2B, 3A-3B, 6, or 7 and a sense sequence that comprises at least 15, 16, 17, 18, or 19 contiguous nucleotides of a corresponding sense sequence provided in Tables 2A-2B, 3A-3B, 6, or 7.

[0216] In some embodiments, the dsRNA comprises an antisense sequence that comprises at least 15, 16, 17, 18, 19, 20, 21, 22, or 23 contiguous nucleotides of an antisense sequence provided in Tables 2A-2B or 3A-3B and a sense sequence that comprises at least 15, 16, 17, 18, 19, 20, or 21 contiguous nucleotides of a corresponding sense sequence provided in Tables 2A-2B, 3A-3B, 6, or 7.

[0217] In some embodiments, the dsRNA comprises an antisense sequence that comprises at least 15, 16, 17, 18, 19, 20, 21, 22, or 23 contiguous nucleotides of an antisense sequence provided in Table 2A or 2B and a sense sequence that comprises at least 15, 16, 17, 18, 19, 20, or 21 contiguous nucleotides of a corresponding sense sequence provided in Table 2A or 2B.

[0218] In some embodiments, the dsRNA comprises an antisense sequence that comprises at least 15, 16, 17, 18, 19, 20, 21, 22, or 23 contiguous nucleotides of an antisense sequence provided in Table 3A or 3B and a sense sequence that comprises at least 15, 16, 17, 18, 19, 20, or 21 contiguous nucleotides of a corresponding sense sequence provided in Table 3A or 3B.

[0219] In some embodiments, the dsRNA comprises an antisense sequence that comprises at least 15, 16, 17, 18, 19, 20, 21, 22, or 23 contiguous nucleotides of an antisense sequence provided in Table 6 or 7 and a sense sequence that comprises at least 15, 16, 17, 18, 19, 20, or 21 contiguous nucleotides of a corresponding sense sequence provided in Table 6 or 7.

[0220] In some such embodiments, the dsRNA, although it comprises only a portion of the sequences provided in Tables 2A-2B, 3A-3B, 6 or 7 is equally effective in inhibiting a level of LECT2 expression as is a dsRNA that comprises the full-length sequences provided in Tables 2A-2B, 3A-3B, 6 or 7. In some embodiments, the dsRNA differs in its inhibition of a level of expression of a LECT2 gene by not more than 5, 10, 15, 20, 25, 30, 35, 40, 45, or 50% inhibition compared with a dsRNA comprising the full sequence disclosed herein.

[0221] The iRNAs provided in Tables 2A-2B, 3A-3B, 4A-4B, or 5-7 identify a site in a LECT2 transcript that is susceptible to RISC-mediated cleavage. As such, the present disclosure further features iRNAs that target within one of such sequences. As used herein, an iRNA is said to target within a particular site of an RNA transcript if the iRNA promotes cleavage of the transcript anywhere within that particular site. Such an iRNA will generally include at least 15 contiguous nucleotides from one of the sequences provided in Tables 2A-2B, 3A-3B, 4A-4B, or 5-7 coupled to additional nucleotide sequences taken from the region contiguous to the selected sequence in a LECT2 gene.

[0222] While a target sequence is generally 15-30 nucleotides in length, there is wide variation in the suitability of particular sequences in this range for directing cleavage of any given target RNA. Various software packages and the guidelines set out herein provide guidance for the identification of optimal target sequences for any given gene target, but an empirical approach can also be taken in which a “window” or “mask” of a given size (as a non-limiting example, 21 nucleotides) is literally or figuratively (including, e.g., in silico) placed on the target RNA sequence to identify sequences in the size range that may serve as target sequences. By moving the sequence “window” progressively one nucleotide upstream or downstream of an initial target sequence location, the next potential target sequence can be identified, until the complete set of possible sequences is identified for any given target size selected. This process, coupled with systematic synthesis and testing of the identified sequences (using assays described herein or known in the art) to identify those sequences that perform optimally can identify those RNA sequences that, when targeted with an iRNA agent, mediate the best inhibition of target gene expression. Thus, while the sequences identified, for example, in Tables 2A-2B, 3A-3B, 6 or 7, represent effective target sequences, it is contemplated that further optimization of inhibition efficiency can be achieved by progressively “walking the window” one nucleotide upstream or downstream of the given sequences to identify sequences with equal or better inhibition characteristics.

[0223] Further, it is contemplated that for any sequence identified, e.g., in Tables 2A-2B, 3A-3B, 6 or 7, further optimization can be achieved by systematically either adding or removing nucleotides to generate longer or shorter sequences and testing those and sequences generated by walking a window of the longer or shorter size up or down the target RNA from that point. Again, coupling this approach to generating new candidate targets with testing for effectiveness of iRNAs based on those target sequences in an inhibition assay as known in the art or as described herein can lead to further improvements in the efficiency of inhibition. Further still, such optimized sequences can be adjusted by, e.g., the introduction of modified nucleotides as described herein or as known in the art, addition or changes in overhang, or other modifications as known in the art and/or discussed herein to further optimize the molecule (e.g., increasing serum stability or circulating half-life, increasing thermal stability, enhancing transmembrane delivery, targeting to a particular location or cell type, increasing interaction with silencing pathway enzymes, increasing release from endosomes, etc.) as an expression inhibitor.

[0224] An iRNA as described herein can contain one or more mismatches to the target sequence. In one embodiment, an iRNA as described herein contains no more than 3 mismatches. If the antisense strand of the iRNA contains mismatches to a target sequence, it is preferable that the area of mismatch not be located in the center of the region of complementarity. If the antisense strand of the iRNA contains mismatches to the target sequence, it is preferable that the mismatch be restricted to be within the last 5 nucleotides from either the 5′ or 3′ end of the region of complementarity. For example, for a 23 nucleotide iRNA agent RNA strand which is complementary to a region of a LECT2 gene, the RNA strand generally does not contain any mismatch within the central 13 nucleotides. The methods described herein or methods known in the art can be used to determine whether an iRNA containing a mismatch to a target sequence is effective in inhibiting the expression of a LECT2 gene. Consideration of the efficacy of iRNAs with mismatches in inhibiting expression of a LECT2 gene is important, especially if the particular region of complementarity in a LECT2 gene is known to have polymorphic sequence variation within the population.

[0225] In one embodiment, at least one end of a dsRNA has a single-stranded nucleotide overhang of 1 to 4, generally 1 or 2 nucleotides. dsRNAs having at least one nucleotide overhang have unexpectedly superior inhibitory properties relative to their blunt-ended counterparts. In yet another embodiment, the RNA of an iRNA (e.g., a dsRNA) is chemically modified to enhance stability or other beneficial characteristics. The nucleic acids featured in the disclosure may be synthesized and/or modified by methods well established in the art, such as those described in “Current protocols in nucleic acid chemistry,” Beaucage, S. L. et al. (Edrs.), John Wiley & Sons, Inc., New York, NY, USA, which is hereby incorporated herein by reference. Modifications include, for example, (a) end modifications, e.g., 5′ end modifications (phosphorylation, conjugation, inverted linkages, etc.) 3′ end modifications (conjugation, DNA nucleotides, inverted linkages, etc.), (b) base modifications, e.g., replacement with stabilizing bases, destabilizing bases, or bases that base pair with an expanded repertoire of partners, removal of bases (abasic nucleotides), or conjugated bases, (c) sugar modifications (e.g., at the 2′ position or 4′ position, or having an acyclic sugar) or replacement of the sugar, as well as (d) backbone modifications, including modification or replacement of the phosphodiester linkages. Specific examples of RNA compounds useful in this disclosure include, but are not limited to RNAs containing modified backbones or no natural internucleoside linkages. RNAs having modified backbones include, among others, those that do not have a phosphorus atom in the backbone. For the purposes of this specification, and as sometimes referenced in the art, modified RNAs that do not have a phosphorus atom in their internucleoside backbone can also be considered to be oligonucleosides. In particular embodiments, the modified RNA will have a phosphorus atom in its internucleoside backbone.

[0226] Modified RNA backbones include, for example, phosphorothioates, chiral phosphorothioates, phosphorodithioates, phosphotriesters, aminoalkylphosphotriesters, methyl and other alkyl phosphonates including 3′-alkylene phosphonates and chiral phosphonates, phosphinates, phosphoramidates including 3′-amino phosphoramidate and aminoalkylphosphoramidates, thionophosphoramidates, thionoalkylphosphonates, thionoalkylphosphotriesters, and boranophosphates having normal 3′-5′ linkages, 2′-5′ linked analogs of these, and those) having inverted polarity wherein the adjacent pairs of nucleoside units are linked 3′-5′ to 5′-3′ or 2′-5′ to 5′-2′. Various salts, mixed salts and free acid forms are also included.

[0227] Representative U.S. patents that teach the preparation of the above phosphorus-containing linkages include, but are not limited to, U.S. Pat. Nos. 3,687,808; 4,469,863; 4,476,301; 5,023,243; 5,177,195; 5,188,897; 5,264,423; 5,276,019; 5,278,302; 5,286,717; 5,321,131; 5,399,676; 5,405,939; 5,453,496; 5,455,233; 5,466,677; 5,476,925; 5,519,126; 5,536,821; 5,541,316; 5,550,111; 5,563,253; 5,571,799; 5,587,361; 5,625,050; 6,028,188; 6,124,445; 6,160,109; 6,169,170; 6,172,209; 6,239,265; 6,277,603; 6,326,199; 6,346,614; 6,444,423; 6,531,590; 6,534,639; 6,608,035; 6,683,167; 6,858,715; 6,867,294; 6,878,805; 7,015,315; 7,041,816; 7,273,933; 7,321,029; and U.S. Pat. RE39464, each of which is herein incorporated by reference.

[0228] Modified RNA backbones that do not include a phosphorus atom therein have backbones that are formed by short chain alkyl or cycloalkyl internucleoside linkages, mixed heteroatoms and alkyl or cycloalkyl internucleoside linkages, or one or more short chain heteroatomic or heterocyclic internucleoside linkages. These include those having morpholino linkages (formed in part from the sugar portion of a nucleoside); siloxane backbones; sulfide, sulfoxide and sulfone backbones; formacetyl and thioformacetyl backbones; methylene formacetyl and thioformacetyl backbones; alkene containing backbones; sulfamate backbones; methyleneimino and methylenehydrazino backbones; sulfonate and sulfonamide backbones; amide backbones; and others having mixed N, O, S and CH₂ component parts.

[0229] Representative U.S. patents that teach the preparation of the above oligonucleosides include, but are not limited to, U.S. Pat. Nos. 5,034,506; 5,166,315; 5,185,444; 5,214,134; 5,216,141; 5,235,033; 5,564,562; 5,264,564; 5,405,938; 5,434,257; 5,466,677; 5,470,967; 5,489,677; 5,541,307; 5,561,225; 5,596,086; 5,602,240; 5,608,046; 5,610,289; 5,618,704; 5,623,070; 5,663,312; 5,633,360; 5,677,437; and, 5,677,439, each of which is herein incorporated by reference.

[0230] In other RNA mimetics suitable or contemplated for use in iRNAs, both the sugar and the internucleoside linkage, i.e., the backbone, of the nucleotide units are replaced with novel groups. The base units are maintained for hybridization with an appropriate nucleic acid target compound. One such oligomeric compound, an RNA mimetic that has been shown to have excellent hybridization properties, is referred to as a peptide nucleic acid (PNA). In PNA compounds, the sugar backbone of an RNA is replaced with an amide containing backbone, in particular an aminoethylglycine backbone. The nucleobases are retained and are bound directly or indirectly to aza nitrogen atoms of the amide portion of the backbone. Representative U.S. patents that teach the preparation of PNA compounds include, but are not limited to, U.S. Pat. Nos. 5,539,082; 5,714,331; and 5,719,262, each of which is herein incorporated by reference. Further teaching of PNA compounds can be found, for example, in Nielsen et al., Science, 1991, 254, 1497-1500.

[0231] Some embodiments featured in the disclosure include RNAs with phosphorothioate backbones and oligonucleosides with heteroatom backbones, and in particular —CH₂—NH—CH₂—, —CH₂—N(CH₃)—O—CH₂—[known as a methylene (methylimino) or MMI backbone], —CH₂—O—N(CH₃)—CH₂—, —CH₂—N(CH₃)—N(CH₃)—CH₂—and —N(CH₃)—CH₂—CH₂—[wherein the native phosphodiester backbone is represented as —O—P—O—CH₂—] of the above-referenced U.S. Pat. No. 5,489,677, and the amide backbones of the above-referenced U.S. Pat. No. 5,602,240. In some embodiments, the RNAs featured herein have morpholino backbone structures of the above-referenced U.S. Pat. No. 5,034,506.

[0232] Modified RNAs may also contain one or more substituted sugar moieties. The iRNAs, e.g., dsRNAs, featured herein can include one of the following at the 2′ position: OH; F; O—, S—, or N-alkyl; O—, S—, or N-alkenyl; O-, S- or N-alkynyl; or O-alkyl-O-alkyl, wherein the alkyl, alkenyl and alkynyl may be substituted or unsubstituted C₁ to C₁₀ alkyl or C₂ to C₁₀ alkenyl and alkynyl. Exemplary suitable modifications include O[(CH₂)ₙO]ₘCH₃, O(CH₂)ₙOCH₃, O(CH₂)ₙNH₂, O(CH₂)ₙCH₃, O(CH₂)ₙONH₂, and O(CH₂)ₙON[(CH₂)ₙCH₃)]₂, where n and m are from 1 to about 10. In other embodiments, dsRNAs include one of the following at the 2′ position: C₁ to C₁₀ lower alkyl, substituted lower alkyl, alkaryl, aralkyl, O-alkaryl or O-aralkyl, SH, SCH₃, OCN, Cl, Br, CN, CF₃, OCF₃, SOCH₃, SO₂CH₃, ONO₂, NO₂, N₃, NH₂, heterocycloalkyl, heterocycloalkaryl, aminoalkylamino, polyalkylamino, substituted silyl, an RNA cleaving group, a reporter group, an intercalator, a group for improving the pharmacokinetic properties of an iRNA, or a group for improving the pharmacodynamic properties of an iRNA, and other substituents having similar properties. In some embodiments, the modification includes a 2′-methoxyethoxy (2′-O—CH₂CH₂OCH₃, also known as 2′-O-(2-methoxyethyl) or 2′-MOE) (Martin et al., Helv. Chim. Acta, 1995, 78:486-504) i.e., an alkoxy-alkoxy group. Another exemplary modification is 2′-dimethylaminooxyethoxy, i.e., a O(CH₂)₂ON(CH₃)₂ group, also known as 2′-DMAOE, and 2′-dimethylaminoethoxyethoxy (also known in the art as 2′-O-dimethylaminoethoxyethyl or 2′-DMAEOE), i.e., 2′-O—CH₂—O—CH₂—N(CH₂)₂.

[0233] In other embodiments, an iRNA agent comprises one or more (e.g., about 1, 2, 3, 4, 5, 6, 7, 8, 9, 10, or more) acyclic nucleotides (or nucleosides). In certain embodiments, the sense strand or the antisense strand, or both sense strand and antisense strand, include less than five acyclic nucleotides per strand (e.g., four, three, two or one acyclic nucleotides per strand). The one or more acyclic nucleotides can be found, for example, in the double-stranded region, of the sense or antisense strand, or both strands; at the 5′-end, the 3′-end, both of the 5′ and 3′-ends of the sense or antisense strand, or both strands, of the iRNA agent. In one embodiment, one or more acyclic nucleotides are present at positions 1 to 8 of the sense or antisense strand, or both. In one embodiment, one or more acyclic nucleotides are found in the antisense strand at positions 4 to 10 (e.g., positions 6-8) from the 5′-end of the antisense strand. In another embodiment, the one or more acyclic nucleotides are found at one or both 3′-terminal overhangs of the iRNA agent.

[0234] The term “acyclic nucleotide” or “acyclic nucleoside” as used herein refers to any nucleotide or nucleoside having an acyclic sugar, e.g., an acyclic ribose. An exemplary acyclic nucleotide or nucleoside can include a nucleobase, e.g., a naturally-occurring or a modified nucleobase (e.g., a nucleobase as described herein). In certain embodiments, a bond between any of the ribose carbons (C1, C2, C3, C4, or C5), is independently or in combination absent from the nucleotide. In one embodiment, the bond between C2-C3 carbons of the ribose ring is absent, e.g., an acyclic 2′-3′-seco-nucleotide monomer. In other embodiments, the bond between C1-C2, C3-C4, or C4-C5 is absent (e.g., a 1′-2′, 3′-4′ or 4′-5′-seco nucleotide monomer). Exemplary acyclic nucleotides are disclosed in U.S. Pat. No. 8,314,227, incorporated herein by reference in its entirely. For example, an acyclic nucleotide can include any of monomers D-J in FIGS. 1-2 of U.S. Pat. No. 8,314,227. In one embodiment, the acyclic nucleotide includes the following monomer:

[chemical structure]

[0235] wherein Base is a nucleobase, e.g., a naturally-occurring or a modified nucleobase (e.g., a nucleobase as described herein).

[0236] In certain embodiments, the acyclic nucleotide can be modified or derivatized, e.g., by coupling the acyclic nucleotide to another moiety, e.g., a ligand (e.g., a GalNAc, a cholesterol ligand), an alkyl, a polyamine, a sugar, a polypeptide, among others.

[0237] In other embodiments, the iRNA agent includes one or more acyclic nucleotides and one or more LNAs (e.g., an LNA as described herein). For example, one or more acyclic nucleotides and/or one or more LNAs can be present in the sense strand, the antisense strand, or both. The number of acyclic nucleotides in one strand can be the same or different from the number of LNAs in the opposing strand. In certain embodiments, the sense strand and/or the antisense strand comprises less than five LNAs (e.g., four, three, two or one LNAs) located in the double stranded region or a 3′-overhang. In other embodiments, one or two LNAs are located in the double stranded region or the 3′-overhang of the sense strand. Alternatively, or in combination, the sense strand and/or antisense strand comprises less than five acyclic nucleotides (e.g., four, three, two or one acyclic nucleotides) in the double-stranded region or a 3′-overhang. In one embodiment, the sense strand of the iRNA agent comprises one or two LNAs in the 3′-overhang of the sense strand, and one or two acyclic nucleotides in the double-stranded region of the antisense strand (e.g., at positions 4 to 10 (e.g., positions 6-8) from the 5′-end of the antisense strand) of the iRNA agent.

[0238] In other embodiments, inclusion of one or more acyclic nucleotides (alone or in addition to one or more LNAs) in the iRNA agent results in one or more (or all) of: (i) a reduction in an off-target effect; (ii) a reduction in passenger strand participation in RNAi; (iii) an increase in specificity of the guide strand for its target mRNA; (iv) a reduction in a microRNA off-target effect; (v) an increase in stability; or (vi) an increase in resistance to degradation, of the iRNA molecule.

[0239] Other modifications include 2′-methoxy (2′-OCH₃), 2′-5 aminopropoxy (2′-OCH₂CH₂CH₂NH₂) and 2′-fluoro (2′-F). Similar modifications may also be made at other positions on the RNA of an iRNA, particularly the 3′ position of the sugar on the 3′ terminal nucleotide or in 2′-5′ linked dsRNAs and the 5′ position of 5′ terminal nucleotide. iRNAs may also have sugar mimetics such as cyclobutyl moieties in place of the pentofuranosyl sugar. Representative U.S. patents that teach the preparation of such modified sugar structures include, but are not limited to, U.S. Pat. Nos. 4,981,957; 5,118,800; 5,319,080; 5,359,044; 5,393,878; 5,446,137; 5,466,786; 5,514,785; 5,519,134; 5,567,811; 5,576,427; 5,591,722; 5,597,909; 5,610,300; 5,627,053; 5,639,873; 5,646,265; 5,658,873; 5,670,633; and 5,700,920, certain of which are commonly owned with the instant application, and each of which is herein incorporated by reference.

[0240] An iRNA may also include nucleobase (often referred to in the art simply as “base”) modifications or substitutions. As used herein, “unmodified” or “natural” nucleobases include the purine bases adenine (A) and guanine (G), and the pyrimidine bases thymine (T), cytosine (C) and uracil (U). Modified nucleobases include other synthetic and natural nucleobases such as 5-methylcytosine (5-me-C), 5-hydroxymethyl cytosine, xanthine, hypoxanthine, 2-aminoadenine, 6-methyl and other alkyl derivatives of adenine and guanine, 2-propyl and other alkyl derivatives of adenine and guanine, 2-thiouracil, 2-thiothymine and 2-thiocytosine, 5-halouracil and cytosine, 5-propynyl uracil and cytosine, 6-azo uracil, cytosine and thymine, 5-uracil (pseudouracil), 4-thiouracil, 8-halo, 8-amino, 8-thiol, 8-thioalkyl, 8-hydroxyl anal other 8-substituted adenines and guanines, 5-halo, particularly 5-bromo, 5-trifluoromethyl and other 5-substituted uracils and cytosines, 7-methylguanine and 7-methyladenine, 8-azaguanine and 8-azaadenine, 7-deazaguanine and 7-daazaadenine and 3-deazaguanine and 3-deazaadenine.

[0241] Further nucleobases include those disclosed in U.S. Pat. No. 3,687,808, those disclosed in Modified Nucleosides in Biochemistry, Biotechnology and Medicine, Herdewijn, P. ed. Wiley-VCH, 2008; those disclosed in The Concise Encyclopedia of Polymer Science and Engineering, pages 858-859, Kroschwitz, J. L, ed. John Wiley & Sons, 1990, these disclosed by Englisch et al., Angewandte Chemie, International Edition, 1991, 30, 613, and those disclosed by Sanghvi, Y S., Chapter 15, dsRNA Research and Applications, pages 289-302, Crooke, S. T. and Lebleu, B., Ed., CRC Press, 1993. Certain of these nucleobases are particularly useful 5 for increasing the binding affinity of the oligomeric compounds featured in the disclosure. These include 5-substituted pyrimidines, 6-azapyrimidines and N-2, N-6 and 0-6 substituted purines, including 2-aminopropyladenine, 5-propynyluracil and 5-propynylcytosine. 5-methylcytosine substitutions have been shown to increase nucleic acid duplex stability by 0.6-1.2° C. (Sanghvi, Y. S., Crooke, S. T. and Lebleu, B., Eds., dsRNA Research and Applications, CRC Press, Boca Raton, 1993, pp. 276-278) and are exemplary base substitutions, even more particularly when combined with 2′-O-methoxyethyl sugar modifications.

[0242] Representative U.S. patents that teach the preparation of certain of the above noted modified nucleobases as well as other modified nucleobases include, but are not limited to, the above noted U.S. Pat. No. 3,687,808, as well as U.S. Pat. Nos. 4,845,205; 5,130,30; 5,134,066; 5,175,273; 5,367,066; 5,432,272; 5,457,187; 5,459,255; 5,484,908; 5,502,177; 5,525,711; 5,552,540; 5,587,469; 5,594,121, 5,596,091; 5,614,617; 5,681,941; 6,015,886; 6,147,200; 6,166,197; 6,222,025; 6,235,887; 6,380,368; 6,528,640; 6,639,062; 6,617,438; 7,045,610; 7,427,672; and 7,495,088, each of which is herein incorporated by reference, and U.S. Pat. No. 5,750,692, also herein incorporated by reference.

[0243] The RNA of an iRNA can also be modified to include one or more (e.g., about 1, 2, 3, 4, 5, 6, 7, 8, 9, 10, or more) locked nucleic acids (LNA) (also referred to herein as “locked nucleotides”). In one embodiment, a locked nucleic acid is a nucleotide having a modified ribose moiety in which the ribose moiety comprises an extra bridge connecting, e.g., the 2′ and 4′ carbons. This structure effectively “locks” the ribose in the 3′-endo structural conformation. The addition of locked nucleic acids to siRNAs has been shown to increase siRNA stability in serum, increase thermal stability, and to reduce off-target effects (Elmen, J. et al., (2005) Nucleic Acids Research 33(1):439-447; Mook, OR. et al., (2007) Mol Canc Ther 6(3):833-843; Grunweller, A. et al., (2003) Nucleic Acids Research 31(12):3185-3193).

[0244] Representative U.S. Patents that teach the preparation of locked nucleic acids include, but are not limited to, the following: U.S. Pat. Nos. 6,268,490; 6,670,461; 6,794,499; 6,998,484; 7,053,207; 7,084,125; 7,399,845, and 8,314,227, each of which is herein incorporated by reference in its entirety. Exemplary LNAs include but are not limited to, a 2′, 4′-C methylene bicyclo nucleotide (see for example Wengel et al., International PCT 5 Publication No. WO 00/66604 and WO 99/14226).

[0245] In other embodiments, the iRNA agents include one or more (e.g., about 1, 2, 3, 4, 5, 6, 7, 8, 9, 10, or more) G-clamp nucleotides. A G-clamp nucleotide is a modified cytosine analog wherein the modifications confer the ability to hydrogen bond both Watson-Crick and Hoogsteen faces of a complementary guanine within a duplex, see for example Lin and Matteucci, 1998, J. Am. Chem. Soc., 120, 8531-8532. A single G-clamp analog substitution within an oligonucleotide can result in substantially enhanced helical thermal stability and mismatch discrimination when hybridized to complementary oligonucleotides. The inclusion of such nucleotides in the iRNA molecules can result in enhanced affinity and specificity to nucleic acid targets, complementary sequences, or template strands.

[0246] Potentially stabilizing modifications to the ends of RNA molecules can include N-(acetylaminocaproyl)-4-hydroxyprolinol (Hyp-C6-NHAc), N-(caproyl-4-hydroxyprolinol (Hyp-C6), N-(acetyl-4-hydroxyprolinol (Hyp-NHAc), thymidine-2′-O-deoxythymidine (ether), N-(aminocaproyl)-4-hydroxyprolinol (Hyp-C6-amino), 2-docosanoyl-uridine-3″-phosphate, inverted base dT(idT) and others. Disclosure of this modification can be found in PCT Publication No. WO 2011/005861.

iRNA Motifs

[0247] In one embodiment, the sense strand sequence may be represented by formula (I):

[chemical structure]

[0248] wherein:
[0249] i and j are each independently 0 or 1;
[0250] p and q are each independently 0-6;
[0251] each Nₐ independently represents an oligonucleotide sequence comprising 0-25 modified nucleotides, each sequence comprising at least two differently modified nucleotides;
[0252] each N_{b} independently represents an oligonucleotide sequence comprising 0-10 modified nucleotides;
[0253] each nₚ and n_{q} independently represent an overhang nucleotide;
[0254] wherein N_{b} and Y do not have the same modification; and
[0255] XXX, YYY and ZZZ each independently represent one motif of three identical modifications on three consecutive nucleotides. Preferably YYY is all 2′-F modified nucleotides.

[0256] In one embodiment, the Nₐ and/or N_{b} comprise modifications of alternating pattern.

[0257] In one embodiment, the YYY motif occurs at or near the cleavage site of the sense strand. For example, when the RNAi agent has a duplex region of 17-23 nucleotides in length, the YYY motif can occur at or the vicinity of the cleavage site (e.g.: can occur at positions 6, 7, 8; 7, 8, 9; 8, 9, 10; 9, 10, 11; 10, 11, 12 or 11, 12, 13) of the sense strand, the count starting from the 1^{st} nucleotide, from the 5′-end; or optionally, the count starting at the 1ₛₜ paired nucleotide within the duplex region, from the 5′-end.

[0258] In one embodiment, i is 1 and j is 0, or i is 0 and j is 1, or both i and j are 1. The sense strand can therefore be represented by the following formulas:

[chemical structure]

[0259] When the sense strand is represented by formula (Ib), N_{b} represents an oligonucleotide sequence comprising 0-10, 0-7, 0-5, 0-4, 0-2 or 0 modified nucleotides. Each Nₐ independently can represent an oligonucleotide sequence comprising 2-20, 2-15, or 2-10 modified nucleotides.

[0260] When the sense strand is represented as formula (Ic), N_{b} represents an oligonucleotide sequence comprising 0-10, 0-7, 0-5, 0-4, 0-2 or 0 modified nucleotides. Each Nₐ can independently represent an oligonucleotide sequence comprising 2-20, 2-15, or 2-10 modified nucleotides.

[0261] When the sense strand is represented as formula (Id), each N_{b} independently represents an oligonucleotide sequence comprising 0-10, 0-7, 0-5, 0-4, 0-2 or 0 modified nucleotides. Preferably, N_{b} is 0, 1, 2, 3, 4, 5 or 6. Each Nₐ can independently represent an oligonucleotide sequence comprising 2-20, 2-15, or 2-10 modified nucleotides.

[0262] Each of X, Y and Z may be the same or different from 5 each other.

[0263] In other embodiments, i is 0 and j is 0, and the sense strand may be represented by the formula:

[chemical structure]

[0264] When the sense strand is represented by formula (Ia), each Nₐ independently can represent an oligonucleotide sequence comprising 2-20, 2-15, or 2-10 modified nucleotides.

[0265] In one embodiment, the antisense strand sequence of the RNAi may be represented by formula (II):

[chemical structure]

[0266] wherein:
[0267] k and l are each independently 0 or 1;
[0268] p′ and q′ are each independently 0-6;
[0269] each Nₐ′ independently represents an oligonucleotide sequence comprising 0-25 modified nucleotides, each sequence comprising at least two differently modified nucleotides;
[0270] each N_{b}′ independently represents an oligonucleotide sequence comprising 0-10 modified nucleotides;
[0271] each nₚ′ and n_{q}′ independently represent an overhang nucleotide;
[0272] wherein N_{b}′ and Y′ do not have the same modification;
[0273] and
[0274] X′X′X′, Y′Y′Y′, and Z′Z′Z′ each independently represent one of three identical modification on three consecutive nucleotides.

[0275] In one embodiment, the Nₐ′ and/or N_{b}′ comprise modification of alternating pattern.

[0276] The Y′Y′Y′ motif occurs at or near the cleavage site of the antisense strand. For example, when the RNAi agent has a duplex region of 17-23 nucleotides in length, the Y′Y′Y′ motif can occur at positions 9, 10, 11; 10, 11, 12; 11, 12, 13; 12, 13, 14; or 13, 14, 15 of the antisense strand, with the count starting from the 1s′ nucleotide, from the 5′-end; or optionally, the count starting at the 1^{st} paired nucleotide within the duplex region, from the 5′-end. Preferably, the Y′Y′Y′ motif occurs at positions 11, 12, 13.

[0277] In one embodiment, Y′Y′Y′ motif is all 2′-Ome modified nucleotides.

[0278] In on embodiment, k is 1 and l is 0, or k is 0 and l is 1, or both 5 k and l are 1.

[0279] The antisense strand can therefore be represented by the following formulas:

[chemical structure]

[0280] When the antisense strand is represented by formula (IIb), N_{b}′ represents an oligonucleotide sequence comprising 0-10, 0-7, 0-5, 0-4, 0-2 or 0 modified nucleotides. Each Nₐ′ independently represents an oligonucleotide sequence comprising 2-20, 2-15, or 2-10 modified nucleotides.

[0281] When the antisense strand is represented as formula (IId), each N_{b}′ independently represents an oligonucleotide sequence comprising 0-10, 0-7, 0-5, 0-4, 0-2 or 0 modified nucleotides. Each Nₐ′ independently represents an oligonucleotide sequence comprising 2-20, 2-15, or 2-10 modified nucleotides. Preferably, N_{b} is 0, 1, 2, 3, 4, 5 or 6.

[0282] In other embodiments, k is 0 and l is 0 and the antisense strand may be represented by the formula:

[chemical structure]

[0283] When the antisense strand is represented as formula (IIa), each Na′ independently represents an oligonucleotide sequence comprising 2-20, 2-15, or 2-10 modified nucleotides.

[0284] Each of X′, Y′ and Z′ may be the same or different from each other.

[0285] Each nucleotide of the sense strand and antisense strand may be independently modified with LNA, HNA, CeNA, GNA, 2′-methoxyethyl, 2′-O-methyl, 2′-O-allyl, 2′-C-allyl, 2′-hydroxyl, or 2′-fluoro. For example, each nucleotide of the sense strand and antisense strand is independently modified with 2′-O-methyl or 2′-fluoro. Each X, Y, Z, X′, Y′ and Z′, in particular, may represent a 2′-O-methyl modification or a 2′-fluoro modification.

[0286] In one embodiment, the sense strand of the RNAi agent may contain YYY motif occurring at 9, 10 and 11 positions of the strand when the duplex region is 21 nt, the count starting from the 1^{st} nucleotide from the 5′-end, or optionally, the count starting at the 1^{st} paired nucleotide within the duplex region, from the 5′-end; and Y represents 2′-F modification. The sense strand may additionally contain XXX motif or ZZZ motifs as wing modifications at the opposite end of the duplex region; and XXX and ZZZ each independently represents a 2′-OMe modification or 2′-F modification.

[0287] In one embodiment the antisense strand may Y′Y′Y′ motif occurring at positions 11, 12, 13 of the strand, the count starting from the 1^{st} nucleotide from the 5′-end, or optionally, the count starting at the 1^{st} paired nucleotide within the duplex region, from the 5′-end; and Y′ represents 2′-O-methyl modification. The antisense strand may additionally contain X′X′X′ motif or Z′Z′Z′ motifs as wing modifications at the opposite end of the duplex region; and X′X′X′ and Z′Z′Z′ each independently represents a 2′-OMe modification or 2′-F modification.

[0288] The sense strand represented by any one of the above formulas (Ia), (Ib), (Ic), and (Id) forms a duplex with an antisense strand being represented by any one of formulas (Ila), (IIb), (IIc), and (IId), respectively.

[0289] Accordingly, the RNAi agents for use in the methods of the disclosure may comprise a sense strand and an antisense strand, each strand having 14 to 30 nucleotides, the RNAi duplex represented by formula (III):

[chemical structure]

[0290] wherein,
[0291] i, j, k, and l are each independently 0 or 1;
[0292] p, p′, q, and q′ are each independently 0-6;
[0293] each Nₐ and Nₐ′ independently represents an oligonucleotide sequence comprising 0-25 modified nucleotides, each sequence comprising at least two differently modified nucleotides;
[0294] each N_{b} and N_{b}′ independently represents an oligonucleotide sequence comprising 0-10 modified nucleotides;
[0295] wherein
[0296] each nₚ′, nₚ, n_{q}′, and n_{q}, each of which may or may not be present independently represents an overhang nucleotide; and
[0297] XXX, YYY, ZZZ, X′X′X′, Y′Y′Y′, and Z′Z′Z′ each independently represent one motif of three identical modification on three consecutive nucleotides.

[0298] In one embodiment, i is 0 and j is 0; or i is 1 and j is 0; or i is 0 and j is 1; or both i and j are 0; or both i and j are 1. In another embodiment, k is 0 and l is 0; or k is 1 and l is 0; k is 0 and l is 1; or both k and l are 0; or both k and l are 1.

[0299] Exemplary combinations of the sense strand and antisense strand forming a RNAi duplex include the formulas below:

[chemical structure]

[0300] When the RNAi agent is represented by formula (IIIa), each Nₐ independently represents an oligonucleotide sequence comprising 2-20, 2-15, or 2-10 modified nucleotides.

[0301] When the RNAi agent is represented by formula (IIIb), each N_{b} independently represents an oligonucleotide sequence comprising 1-10, 1-7, 1-5 or 1-4 modified nucleotides. Each Na independently represents an oligonucleotide sequence comprising 2-20, 2-15, or 2-10 modified nucleotides.

[0302] When the RNAi agent is represented as formula (IIIc), each N_{b}, N_{b}′ independently represents an oligonucleotide sequence comprising 0-10, 0-7, 0-5, 0-4, 0-2 or 0 modified nucleotides. Each Nₐ independently represents an oligonucleotide sequence comprising 2-20, 2-15, or 2-10 modified nucleotides.

[0303] When the RNAi agent is represented as formula (IIId), each N_{b}, N_{b}′ independently represents an oligonucleotide sequence comprising 0-10, 0-7, 0-5, 0-4, 0-2 or 0 modified nucleotides. Each Nₐ, Nₐ′ independently represents an oligonucleotide sequence comprising 2-20, 2-15, or 2-10 modified nucleotides. Each of Nₐ, Nₐ′, N_{b} and N_{b}′ independently comprises modifications of alternating pattern.

[0304] Each of X, Y and Z in formulas (III), (IIIa), (IIIb), (IIIc), and (IIId) may be the same or different from each other.

[0305] When the RNAi agent is represented by formula (III), (IIIa), (IIIb), (IIIc), and (IIId), at least one of the Y nucleotides may form a base pair with one of the Y′ nucleotides. Alternatively, at least two of the Y nucleotides form base pairs with the corresponding Y′ nucleotides; or all three of the Y nucleotides all form base pairs with the corresponding Y′ nucleotides.

[0306] When the RNAi agent is represented by formula (IIIb) or (IIId), at least one of the Z nucleotides may form a base pair with one of the Z′ nucleotides. Alternatively, at least two of the Z nucleotides form base pairs with the corresponding Z′ nucleotides; or all three of the Z nucleotides all form base pairs with the corresponding Z′ nucleotides.

[0307] When the RNAi agent is represented as formula (IIc) or (IIId), at least one of the X nucleotides may form a base pair with one of the X′ nucleotides. Alternatively, at least two of the X nucleotides form base pairs with the corresponding X′ nucleotides; or all three of the X nucleotides all form base pairs with the corresponding X′ nucleotides.

[0308] In one embodiment, the modification on the Y nucleotide is different than the modification on the Y′ nucleotide, the modification on the Z nucleotide is different than the modification on the Z′ nucleotide, and/or the modification on the X nucleotide is different than the modification on the X′ nucleotide.

[0309] In one embodiment, when the RNAi agent is represented by formula (IIId), the Na modifications are 2′-O-methyl or 2′-fluoro modifications. In another embodiment, when the RNAi agent is represented by formula (IIId), the Nₐ modifications are 2′-O-methyl or 2′-fluoro modifications and nₚ′>0 and at least one nₚ′ is linked to a neighboring nucleotide a via phosphorothioate linkage. In yet another embodiment, when the RNAi agent is represented by formula (IIId), the Nₐ modifications are 2′-O-methyl or 2′-fluoro modifications, nₚ′>0 and at least one nₚ′ is linked to a neighboring nucleotide via phosphorothioate linkage, and the sense strand is conjugated to one or more GalNAc derivatives attached through a bivalent or trivalent branched linker. In another embodiment, when the RNAi agent is represented by formula (IIId), the Nₐ modifications are 2′-O-methyl or 2′-fluoro modifications, nₚ′>0 and at least one nₚ′ is linked to a neighboring nucleotide via phosphorothioate linkage, the sense strand comprises at least one phosphorothioate linkage, and the sense strand is conjugated to one or more GalNAc derivatives attached through a bivalent or trivalent branched linker.

[0310] In one embodiment, when the RNAi agent is represented by formula (IIIa), the Na modifications are 2′-O-methyl or 2′-fluoro modifications, nₚ′>0 and at least one nₚ′ is linked to a neighboring nucleotide via phosphorothioate linkage, the sense strand comprises at least one phosphorothioate linkage, and the sense strand is conjugated to one or more GalNAc derivatives attached through a bivalent or trivalent branched linker.

[0311] In one embodiment, the RNAi agent is a multimer containing at least two duplexes represented by formula (III), (IIIa), (IIIb), (IIIc), and (IIId), wherein the duplexes are connected by a linker. The linker can be cleavable or non-cleavable. Optionally, the multimer further comprises a ligand. Each of the duplexes can target the same gene or two different genes; or each of the duplexes can target same gene at two different target sites.

[0312] In one embodiment, the RNAi agent is a multimer containing three, four, five, six or more duplexes represented by formula (III), (IIIa), (IIIb), (IIIc), and (IIId), wherein the duplexes are connected by a linker. The linker can be cleavable or non-cleavable. Optionally, the multimer further comprises a ligand. Each of the duplexes can target the same gene or two different genes; or each of the duplexes can target same gene at two different target sites.

[0313] In one embodiment, two RNAi agents represented by formula (III), (IIIa), (IIIb), (IIIc), and (IIId) are linked to each other at the 5′ end, and one or both of the 3′ ends and are optionally conjugated to a ligand. Each of the agents can target the same gene or two different genes; or each of the agents can target same gene at two different target sites.

iRNA Conjugates

[0314] The iRNA agents disclosed herein can be in the form of conjugates. The conjugate may be attached at any suitable location in the iRNA molecule, e.g., at the 3′ end or the 5′ end of the sense or the antisense strand. The conjugates are optionally attached via a linker.

[0315] In some embodiments, an iRNA agent described herein is chemically linked to one or more ligands, moieties or conjugates, which may confer functionality, e.g., by affecting (e.g., enhancing) the activity, cellular distribution or cellular uptake of the iRNA. Such moieties include but are not limited to lipid moieties such as a cholesterol moiety (Letsinger et al., Proc. Natl. Acid. Sci. USA, 1989, 86: 6553-6556), cholic acid (Manoharan et al., Biorg. Med. Chem. Let., 1994, 4:1053-1060), a thioether, e.g., beryl-S-tritylthiol (Manoharan et al., Ann. N.Y. Acad. Sci., 1992, 660:306-309; Manoharan et al., Biorg. Med. Chem. Let., 1993, 3:2765-2770), a thiocholesterol (Oberhauser et al., Nucl. Acids Res., 1992, 20:533-538), an aliphatic chain, e.g., dodecandiol or undecyl residues (Saison-Behmoaras et al., EMBO J, 1991, 10:1111-1118; Kabanov et al., FEBS Lett., 1990, 259:327-330; Svinarchuk et al., Biochimie, 1993, 75:49-54), a phospholipid, e.g., di-hexadecyl-rac-glycerol or triethyl-ammonium 1,2-di-O-hexadecyl-rac-glycero-3-phosphonate (Manoharan et al., Tetrahedron Lett., 1995, 36:3651-3654; Shea et al., Nucl. Acids Res., 1990, 18:3777-3783), a polyamine or a polyethylene glycol chain (Manoharan et al., Nucleosides & Nucleotides, 1995, 14:969-973), or adamantane acetic acid (Manoharan et al., Tetrahedron Lett., 1995, 36:3651-3654), a palmityl moiety (Mishra et al., Biochim. Biophys. Acta, 1995, 1264:229-237), or an octadecylamine or hexylamino-carbonyloxycholesterol moiety (Crooke et al., J. Pharmacol. Exp. Ther., 1996, 277:923-937).

[0316] In one embodiment, a ligand alters the distribution, targeting or lifetime of an iRNA agent into which it is incorporated. In some embodiments, a ligand provides an enhanced affinity for a selected target, e.g., molecule, cell or cell type, compartment, e.g., a cellular or organ compartment, tissue, organ or region of the body, as, e.g., compared to a species absent such a ligand. Typical ligands will not take part in duplex pairing in a duplexed nucleic acid.

[0317] Ligands can include a naturally occurring substance, such as a protein (e.g., human serum albumin (HSA), low-density lipoprotein (LDL), or globulin); carbohydrate (e.g., a dextran, pullulan, chitin, chitosan, inulin, cyclodextrin or hyaluronic acid); or a lipid. The ligand may also be a recombinant or synthetic molecule, such as a synthetic polymer, e.g., a synthetic polyamino acid. Examples of polyamino acids include polyamino acid is a polylysine (PLL), poly L-aspartic acid, poly L-glutamic acid, styrene-maleic acid anhydride copolymer, poly(L-lactide-co-glycolied) copolymer, divinyl ether-maleic anhydride copolymer, N-(2-hydroxypropyl)methacrylamide copolymer (HMPA), polyethylene glycol (PEG), polyvinyl alcohol (PVA), polyurethane, poly(2-ethylacryllic acid), N-isopropylacrylamide polymers, or polyphosphazine. Example of polyamines include: polyethylenimine, polylysine (PLL), spermine, spermidine, polyamine, pseudopeptide-polyamine, peptidomimetic polyamine, dendrimer polyamine, arginine, amidine, protamine, cationic lipid, cationic porphyrin, quaternary salt of a polyamine, or an a helical peptide.

[0318] Ligands can also include targeting groups, e.g., a cell or tissue targeting agent, e.g., a lectin, glycoprotein, lipid or protein, e.g., an antibody, that binds to a specified cell type such as a kidney cell. A targeting group can be a thyrotropin, melanotropin, lectin, glycoprotein, surfactant protein A, Mucin carbohydrate, multivalent lactose, multivalent galactose, N-acetyl-galactosamine, N-acetyl-gulucosamine multivalent mannose, multivalent fucose, glycosylated polyaminoacids, multivalent galactose, transferrin, bisphosphonate, polyglutamate, polyaspartate, a lipid, cholesterol, a steroid, bile acid, folate, vitamin B12, biotin, or an RGD peptide or RGD peptide mimetic.

[0319] In some embodiments, the ligand is a GalNAc ligand that comprises one or more N-acetylgalactosamine (GalNAc) derivatives. In some embodiments, the GalNAc ligand is used to target the iRNA to the liver (e.g., to hepatocytes). Additional description of GalNAc ligands is provided in the section titled Carbohydrate Conjugates.

[0320] Other examples of ligands include dyes, intercalating agents (e.g. acridines), cross-linkers (e.g. psoralene, mitomycin C), porphyrins (TPPC4, texaphyrin, Sapphyrin), polycyclic aromatic hydrocarbons (e.g., phenazine, dihydrophenazine), artificial endonucleases (e.g. EDTA), lipophilic molecules, e.g., cholesterol, cholic acid, adamantane acetic acid, 1-pyrene butyric acid, dihydrotestosterone, 1,3-Bis-O(hexadecyl)glycerol, geranyloxyhexyl group, hexadecylglycerol, borneol, menthol, 1,3-propanediol, heptadecyl group, palmitic acid, myristic acid,O3-(oleoyl)lithocholic acid, O3-(oleoyl)cholenic acid, dimethoxytrityl, or phenoxazine) and peptide conjugates (e.g., antennapedia peptide, Tat peptide), alkylating agents, phosphate, amino, mercapto, PEG (e.g., PEG-40K), MPEG, [MPEG]₂, polyamino, alkyl, substituted alkyl, radiolabeled markers, enzymes, haptens (e.g. biotin), transport/absorption facilitators (e.g., aspirin, vitamin E, folic acid), synthetic ribonucleases (e.g., imidazole, bisimidazole, histamine, imidazole clusters, acridine-imidazole conjugates, Eu3+ complexes of tetraazamacrocycles), dinitrophenyl, HRP, or AP.

[0321] Ligands can be proteins, e.g., glycoproteins, or peptides, e.g., molecules having a specific affinity for a co-ligand, or antibodies e.g., an antibody, that binds to a specified cell type such as a cancer cell, endothelial cell, or bone cell. Ligands may also include hormones and hormone receptors. They can also include non-peptidic species, such as lipids, lectins, carbohydrates, vitamins, cofactors, multivalent lactose, multivalent galactose, N-acetyl-galactosamine, N-acetyl-gulucosamine multivalent mannose, or multivalent fucose. The ligand can be, for example, a lipopolysaccharide, an activator of p38 MAP kinase, or an activator of NF-κB.

[0322] The ligand can be a substance, e.g., a drug, which can increase the uptake of the iRNA agent into the cell, for example, by disrupting the cell's cytoskeleton, e.g., by disrupting the cell's microtubules, microfilaments, and/or intermediate filaments. The drug can be, for example, taxon, vincristine, vinblastine, cytochalasin, nocodazole, japlakinolide, latrunculin A, phalloidin, swinholide A, indanocine, or myoservin.

[0323] In some embodiments, a ligand attached to an iRNA as described herein acts as a pharmacokinetic modulator (PK modulator). PK modulators include lipophiles, bile acids, steroids, phospholipid analogues, peptides, protein binding agents, PEG, vitamins etc. Exemplary PK modulators include, but are not limited to, cholesterol, fatty acids, cholic acid, lithocholic acid, dialkylglycerides, diacylglyceride, phospholipids, sphingolipids, naproxen, ibuprofen, vitamin E, biotin etc. Oligonucleotides that comprise a number of phosphorothioate linkages are also known to bind to serum protein, thus short oligonucleotides, e.g., oligonucleotides of about 5 bases, 10 bases, 15 bases or 20 bases, comprising multiple of phosphorothioate linkages in the backbone are also amenable to the present disclosure as ligands (e.g. as PK modulating ligands). In addition, aptamers that bind serum components (e.g. serum proteins) are also suitable for use as PK modulating ligands in the embodiments described herein.

[0324] Ligand-conjugated oligonucleotides of the disclosure may be synthesized by the use of an oligonucleotide that bears a pendant reactive functionality, such as that derived from the attachment of a linking molecule onto the oligonucleotide (described below). This reactive oligonucleotide may be reacted directly with commercially-available ligands, ligands that are synthesized bearing any of a variety of protecting groups, or ligands that have a linking moiety attached thereto.

[0325] The oligonucleotides used in the conjugates of the present disclosure may be conveniently and routinely made through the well-known technique of solid-phase synthesis. Equipment for such synthesis is sold by several vendors including, for example, Applied Biosystems (Foster City, Calif.). Any other means for such synthesis known in the art may additionally or alternatively be employed. It is also known to use similar techniques to prepare other oligonucleotides, such as the phosphorothioates and alkylated derivatives.

[0326] In the ligand-conjugated oligonucleotides and ligand-molecule bearing sequence-specific linked nucleosides of the present disclosure, the oligonucleotides and oligonucleosides may be assembled on a suitable DNA synthesizer utilizing standard nucleotide or nucleoside precursors, or nucleotide or nucleoside conjugate precursors that already bear the linking moiety, ligand-nucleotide or nucleoside-conjugate precursors that already bear the ligand molecule, or non-nucleoside ligand-bearing building blocks.

[0327] When using nucleotide-conjugate precursors that already bear a linking moiety, the synthesis of the sequence-specific linked nucleosides is typically completed, and the ligand molecule is then reacted with the linking moiety to form the ligand-conjugated oligonucleotide. In some embodiments, the oligonucleotides or linked nucleosides of the present disclosure are synthesized by an automated synthesizer using phosphoramidites derived from ligand-nucleoside conjugates in addition to the standard phosphoramidites and non-standard phosphoramidites that are commercially available and routinely used in oligonucleotide synthesis.

### Lipid Conjugates

[0328] In one embodiment, the ligand is a lipid or lipid-based molecule. Such a lipid or lipid-based molecule can typically bind a serum protein, such as human serum albumin (HSA). An HSA binding ligand allows for distribution of the conjugate to a target tissue. For example, the target tissue can be the liver, including parenchymal cells of the liver. Other molecules that can bind HSA can also be used as ligands. For example, neproxin or aspirin can be used. A lipid or lipid-based ligand can (a) increase resistance to degradation of the conjugate, (b) increase targeting or transport into a target cell or cell membrane, and/or (c) can be used to adjust binding to a serum protein, e.g., HSA.

[0329] A lipid-based ligand can be used to modulate, e.g., control (e.g., inhibit) the binding of the conjugate to a target tissue. For example, a lipid or lipid-based ligand that binds to HSA more strongly will be less likely to be targeted to the kidney and therefore less likely to be cleared from the body. A lipid or lipid-based ligand that binds to HSA less strongly can be used to target the conjugate to the kidney.

[0330] In one embodiment, the lipid-based ligand binds HSA. For example, the ligand can bind HSA with a sufficient affinity such that distribution of the conjugate to a non-kidney tissue is enhanced. However, the affinity is typically not so strong that the HSA-ligand binding cannot be reversed.

[0331] In another embodiment, the lipid-based ligand binds HSA weakly or not at all, such that distribution of the conjugate to the kidney is enhanced. Other moieties that target to kidney cells can also be used in place of or in addition to the lipid-based ligand.

[0332] In another aspect, the ligand is a moiety, e.g., a vitamin, which is taken up by a target cell, e.g., a proliferating cell. These are particularly useful for treating disorders characterized by unwanted cell proliferation, e.g., of the malignant or non-malignant type, e.g., cancer cells. Exemplary vitamins include vitamin A, E, and K. Other exemplary vitamins include are B vitamin, e.g., folic acid, B12, riboflavin, biotin, pyridoxal or other vitamins or nutrients taken up by cancer cells. Also included are HSA and low-density lipoprotein (LDL).

### Cell Permeation Agents

[0333] In another aspect, the ligand is a cell-permeation agent, such as a helical cell-permeation agent. In one embodiment, the agent is amphipathic. An exemplary agent is a peptide such as tat or antennopedia. If the agent is a peptide, it can be modified, including a peptidylmimetic, invertomers, non-peptide or pseudo-peptide linkages, and use of D-amino acids. The helical agent is typically an α-helical agent, and can have a lipophilic and a lipophobic phase.

[0334] The ligand can be a peptide or peptidomimetic. A peptidomimetic (also referred to herein as an oligopeptidomimetic) is a molecule capable of folding into a defined three-dimensional structure similar to a natural peptide. The attachment of peptide and peptidomimetics to iRNA agents can affect pharmacokinetic distribution of the iRNA, such as by enhancing cellular recognition and absorption. The peptide or peptidomimetic moiety can be about 5-50 amino acids long, e.g., about 5, 10, 15, 20, 25, 30, 35, 40, 45, or 50 amino acids long.

[0335] A peptide or peptidomimetic can be, for example, a cell permeation peptide, cationic peptide, amphipathic peptide, or hydrophobic peptide (e.g., consisting primarily of Tyr, Trp or Phe). The peptide moiety can be a dendrimer peptide, constrained peptide or crosslinked peptide. In another alternative, the peptide moiety can include a hydrophobic membrane translocation sequence (MTS). An exemplary hydrophobic MTS-containing peptide is RFGF having the amino acid sequence AAVALLPAVLLALLAP (SEQ ID NO: 903). An RFGF analogue (e.g., amino acid sequence AALLPVLLAAP (SEQ ID NO: 904)) containing a hydrophobic MTS can also be a targeting moiety. The peptide moiety can be a “delivery” peptide, which can carry large polar molecules including peptides, oligonucleotides, and protein across cell membranes. For example, sequences from the HIV Tat protein (GRKKRRQRRRPPQ (SEQ ID NO: 905)) and the Drosophila Antennapedia protein (RQIKIWFQNRRMKWKK (SEQ ID NO: 906)) have been found to be capable of functioning as delivery peptides. A peptide or peptidomimetic can be encoded by a random sequence of DNA, such as a peptide identified from a phage-display library, or one-bead-one-compound (OBOC) combinatorial library (Lam et al., Nature, 354:82-84, 1991). Typically, the peptide or peptidomimetic tethered to a dsRNA agent via an incorporated monomer unit is a cell targeting peptide such as an arginine-glycine-aspartic acid (RGD)-peptide, or RGD mimic. A peptide moiety can range in length from about 5 amino acids to about 40 amino acids. The peptide moieties can have a structural modification, such as to increase stability or direct conformational properties. Any of the structural modifications described below can be utilized.

[0336] An RGD peptide for use in the compositions and methods of the disclosure may be linear or cyclic, and may be modified, e.g., glycosylated or methylated, to facilitate targeting to a specific tissue(s). RGD-containing peptides and peptidiomimemtics may include D-amino acids, as well as synthetic RGD mimics. In addition to RGD, one can use other moieties that target the integrin ligand. Preferred conjugates of this ligand target PECAM-1 or VEGF.

[0337] An RGD peptide moiety can be used to target a particular cell type, e.g., a tumor cell, such as an endothelial tumor cell or a breast cancer tumor cell (Zitzmann et al., Cancer Res., 62:5139-43, 2002). An RGD peptide can facilitate targeting of an dsRNA agent to tumors of a variety of other tissues, including the lung, kidney, spleen, or liver (Aoki et al., Cancer Gene Therapy 8:783-787, 2001). Typically, the RGD peptide will facilitate targeting of an iRNA agent to the kidney. The RGD peptide can be linear or cyclic, and can be modified, e.g., glycosylated or methylated to facilitate targeting to specific tissues. For example, a glycosylated RGD peptide can deliver a iRNA agent to a tumor cell expressing αᵥβ₃ (Haubner et al., Jour. Nucl. Med., 42:326-336, 2001).

[0338] A “cell permeation peptide” is capable of permeating a cell, e.g., a microbial cell, such as a bacterial or fungal cell, or a mammalian cell, such as a human cell. A microbial cell-permeating peptide can be, for example, an α-helical linear peptide (e.g., LL-37 or Ceropin P1), a disulfide bond-containing peptide (e.g., α-defensin, β-defensin or bactenecin), or a peptide containing only one or two dominating amino acids (e.g., PR-39 or indolicidin). A cell permeation peptide can also include a nuclear localization signal (NLS). For example, a cell permeation peptide can be a bipartite amphipathic peptide, such as MPG, which is derived from the fusion peptide domain of HIV-1 gp41 and the NLS of SV40 large T antigen (Simeoni et al., Nucl. Acids Res. 31:2717-2724, 2003).

### Carbohydrate Conjugates

[0339] In some embodiments of the compositions and methods of the disclosure, an iRNA oligonucleotide further comprises a carbohydrate. The carbohydrate conjugated iRNA are advantageous for the in vivo delivery of nucleic acids, as well as compositions suitable for in vivo therapeutic use, as described herein. As used herein, “carbohydrate” refers to a compound which is either a carbohydrate per se made up of one or more monosaccharide units having at least 6 carbon atoms (which can be linear, branched or cyclic) with an oxygen, nitrogen or sulfur atom bonded to each carbon atom; or a compound having as a part thereof a carbohydrate moiety made up of one or more monosaccharide units each having at least six carbon atoms (which can be linear, branched or cyclic), with an oxygen, nitrogen or sulfur atom bonded to each carbon atom. Representative carbohydrates include the sugars (mono-, di-, tri- and oligosaccharides containing from about 4, 5, 6, 7, 8, or 9 monosaccharide units), and polysaccharides such as starches, glycogen, cellulose and polysaccharide gums. Specific monosaccharides include C5 and above (e.g., C5, C6, C7, or C8) sugars; di- and trisaccharides include sugars having two or three monosaccharide units (e.g., C5, C6, C7, or C8).

[0340] In one embodiment, a carbohydrate conjugate comprises a monosaccharide. In one embodiment, the monosaccharide is an N-acetylgalactosamine (GalNAc). GalNAc conjugates, which comprise one or more N-acetylgalactosamine (GalNAc) derivatives, are described, for example, in U.S. Pat. No. 8,106,022, the entire content of which is hereby incorporated herein by reference. In some embodiments, the GalNAc conjugate serves as a ligand that targets the iRNA to particular cells. In some embodiments, the GalNAc conjugate targets the iRNA to liver cells, e.g., by serving as a ligand for the asialoglycoprotein receptor of liver cells (e.g., hepatocytes).

[0341] In some embodiments, the carbohydrate conjugate comprises one or more GalNAc derivatives. The GalNAc derivatives may be attached via a linker, e.g., a bivalent or trivalent branched linker. In some embodiments the GalNAc conjugate is conjugated to the 3′ end of the sense strand. In some embodiments, the GalNAc conjugate is conjugated to the iRNA agent (e.g., to the 3′ end of the sense strand) via a linker, e.g., a linker as described herein.

[0342] In some embodiments, the GalNAc conjugate is

[chemical structure]

[0343] In some embodiments, the RNAi agent is attached to the carbohydrate conjugate via a linker as shown in the following schematic, wherein X is O or S

[chemical structure]

[0344] In some embodiments, the RNAi agent is conjugated to L96 as defined in Table 1 and shown below

[chemical structure]

[0345] In some embodiments, L96 is as follows:

[chemical structure]

[0346] In some embodiments, a carbohydrate conjugate for use in the compositions and methods of the disclosure is selected from the group consisting of:

[chemical structure]

[chemical structure]

[chemical structure]

[chemical structure]

[chemical structure]

[chemical structure]

[0347] Another representative carbohydrate conjugate for use in the embodiments described herein includes, but is not limited to,

[chemical structure]

[0348] (Formula XXIII), when one of X or Y is an oligonucleotide, the other is a hydrogen.

[0349] In some embodiments, the carbohydrate conjugate further comprises one or more additional ligands as described above, such as, but not limited to, a PK modulator and/or a cell permeation peptide.

[0350] In one embodiment, an iRNA of the disclosure is conjugated to a carbohydrate through a linker. Non-limiting examples of iRNA carbohydrate conjugates with linkers of the compositions and methods of the disclosure include, but are not limited to,

[chemical structure]

[chemical structure]

[chemical structure]

[chemical structure]

[chemical structure]

[chemical structure]

[chemical structure]

when one of X or Y is an oligonucleotide, the other is a hydrogen.

### Linkers

[0351] In some embodiments, the conjugate or ligand described herein can be attached to an iRNA oligonucleotide with various linkers that can be cleavable or non-cleavable.

[0352] The term “linker” or “linking group” means an organic moiety that connects two parts of a compound, e.g., covalently attaches two parts of a compound. Linkers typically comprise a direct bond or an atom such as oxygen or sulfur, a unit such as NR8, C(O), C(O)NH, SO, SO₂, SO₂NH or a chain of atoms, such as, but not limited to, substituted or unsubstituted alkyl, substituted or unsubstituted alkenyl, substituted or unsubstituted alkynyl, arylalkyl, arylalkenyl, arylalkynyl, heteroarylalkyl, heteroarylalkenyl, heteroarylalkynyl, heterocyclylalkyl, heterocyclylalkenyl, heterocyclylalkynyl, aryl, heteroaryl, heterocyclyl, cycloalkyl, cycloalkenyl, alkylarylalkyl, alkylarylalkenyl, alkylarylalkynyl, alkenylarylalkyl, alkenylarylalkenyl, alkenylarylalkynyl, alkynylarylalkyl, alkynylarylalkenyl, alkynylarylalkynyl, alkylheteroarylalkyl, alkylheteroarylalkenyl, alkylheteroarylalkynyl, alkenylheteroarylalkyl, alkenylheteroarylalkenyl, alkenylheteroarylalkynyl, alkynylheteroarylalkyl, alkynylheteroarylalkenyl, alkynylheteroarylalkynyl, alkylheterocyclylalkyl, alkylheterocyclylalkenyl, alkylhererocyclylalkynyl, alkenylheterocyclylalkyl, alkenylheterocyclylalkenyl, alkenylheterocyclylalkynyl, alkynylheterocyclylalkyl, alkynylheterocyclylalkenyl, alkynylheterocyclylalkynyl, alkylaryl, alkenylaryl, alkynylaryl, alkylheteroaryl, alkenylheteroaryl, alkynylhereroaryl, which one or more methylenes can be interrupted or terminated by O, S, S(O), SO₂, N(R8), C(O), substituted or unsubstituted aryl, substituted or unsubstituted heteroaryl, substituted or unsubstituted heterocyclic; where R8 is hydrogen, acyl, aliphatic or substituted aliphatic. In one embodiment, the linker is between about 1-24 atoms, 2-24, 3-24, 4-24, 5-24, 6-24, 6-18, 7-18, 8-18 atoms, 7-17, 8-17, 6-16, 7-16, or 8-16 atoms.

[0353] In one embodiment, a dsRNA of the disclosure is conjugated to a bivalent or trivalent branched linker selected from the group of structures shown in any of formula (XXXI)-(XXXIV):

[chemical structure]

[0354] wherein:
[0355] q2A, q2B, q3A, q3B, q4A, q4B, q5A, q5B and q5C represent independently for each occurrence 0-20 and wherein the repeating unit can be the same or different;
[0356] P^{2A}, P^{2B}, P^{3A}, P^{3B}, P^{4A}, P^{4B}, P^{5A}, P^{5B}, P^{5C}, T^{2A}, T^{2B}, T^{3A}, T^{3B}, T^{4A}, T^{4B}, T^{4A}, T^{5B}, T^{5C} are each independently for each occurrence absent, CO, NH, O, S, OC(O), NHC(O), CH₂, CH₂NH or CH₂O;
[0357] Q^{2A}, Q^{2B}, Q^{3A}, Q^{3B}, Q^{4A}, Q^{4B}, Q^{5A}, Q^{5B}, Q^{5C} are independently for each occurrence absent, alkylene, substituted alkylene wherein one or more methylenes can be interrupted or terminated by one or more of O, S, S(O), SO₂, N(R^{N}), C(R′)═C(R″), C≡C or C(O);
[0358] R^{2A}, R^{2B}, R^{3A}, R^{3B}, R^{4A}, R^{4B}, R^{5A}, R^{5B}, R^{5C} are each independently for each occurrence absent, NH, O, S, CH₂, C(O)O, C(O)NH, NHCH(R^{a})C(O), —C(O)—CH(R^{a})—NH—, CO, CH═N—O,

[chemical structure]

or heterocyclyl;
[0359] L^{2A}, L^{2B}, L^{3A}, L^{3B}, L^{4A}, L^{4B}, L^{5A}, L^{5B} and L^{5C} represent the ligand; i.e. each independently for each occurrence a monosaccharide (such as GalNAc), disaccharide, trisaccharide, tetrasaccharide, oligosaccharide, or polysaccharide; and R^{a} is H or amino acid side chain. Trivalent conjugating GalNAc derivatives are particularly useful for use with RNAi agents for inhibiting the expression of a target gene, such as those of formula (XXXV):

[chemical structure]

[0360] wherein L^{5A}, L^{5B} and L^{5C} represent a monosaccharide, such as GalNAc derivative.

[0361] Examples of suitable bivalent and trivalent branched linker groups conjugating GalNAc derivatives include, but are not limited to, the structures recited above as formulas II, VII, XI, X, and XIII.

[0362] A cleavable linking group is one which is sufficiently stable outside the cell, but which upon entry into a target cell is cleaved to release the two parts the linker is holding together. In a preferred embodiment, the cleavable linking group is cleaved at least about 10 times, 20, times, 30 times, 40 times, 50 times, 60 times, 70 times, 80 times, 90 times or more, or at least about 100 times faster in a target cell or under a first reference condition (which can, e.g., be selected to mimic or represent intracellular conditions) than in the blood of a subject, or under a second reference condition (which can, e.g., be selected to mimic or represent conditions found in the blood or serum).

[0363] Cleavable linking groups are susceptible to cleavage agents, e.g., pH, redox potential or the presence of degradative molecules. Generally, cleavage agents are more prevalent or found at higher levels or activities inside cells than in serum or blood. Examples of such degradative agents include: redox agents which are selected for particular substrates or which have no substrate specificity, including, e.g., oxidative or reductive enzymes or reductive agents such as mercaptans, present in cells, that can degrade a redox cleavable linking group by reduction; esterases; endosomes or agents that can create an acidic environment, e.g., those that result in a pH of five or lower; enzymes that can hydrolyze or degrade an acid cleavable linking group by acting as a general acid, peptidases (which can be substrate specific), and phosphatases.

[0364] A cleavable linkage group, such as a disulfide bond can be susceptible to pH. The pH of human serum is 7.4, while the average intracellular pH is slightly lower, ranging from about 7.1-7.3. Endosomes have a more acidic pH, in the range of 5.5-6.0, and lysosomes have an even more acidic pH at around 5.0. Some linkers will have a cleavable linking group that is cleaved at a preferred pH, thereby releasing a cationic lipid from the ligand inside the cell, or into the desired compartment of the cell.

[0365] A linker can include a cleavable linking group that is cleavable by a particular enzyme. The type of cleavable linking group incorporated into a linker can depend on the cell to be targeted. For example, a liver-targeting ligand can be linked to a cationic lipid through a linker that includes an ester group. Liver cells are rich in esterases, and therefore the linker will be cleaved more efficiently in liver cells than in cell types that are not esterase-rich. Other cell-types rich in esterases include cells of the lung, renal cortex, and testis.

[0366] Linkers that contain peptide bonds can be used when targeting cell types rich in peptidases, such as liver cells and synoviocytes.

[0367] In general, the suitability of a candidate cleavable linking group can be evaluated by testing the ability of a degradative agent (or condition) to cleave the candidate linking group. It will also be desirable to also test the candidate cleavable linking group for the ability to resist cleavage in the blood or when in contact with other non-target tissue. Thus, one can determine the relative susceptibility to cleavage between a first and a second condition, where the first is selected to be indicative of cleavage in a target cell and the second is selected to be indicative of cleavage in other tissues or biological fluids, e.g., blood or serum. The evaluations can be carried out in cell free systems, in cells, in cell culture, in organ or tissue culture, or in whole animals. It can be useful to make initial evaluations in cell-free or culture conditions and to confirm by further evaluations in whole animals. In preferred embodiments, useful candidate compounds are cleaved at least about 2, 4, 10, 20, 30, 40, 50, 60, 70, 80, 90, or about 100 times faster in the cell (or under in vitro conditions selected to mimic intracellular conditions) as compared to blood or serum (or under in vitro conditions selected to mimic extracellular conditions).

### Redox Cleavable Linking Groups

[0368] In one embodiment, a cleavable linking group is a redox cleavable linking group that is cleaved upon reduction or oxidation. An example of reductively cleavable linking group is a disulphide linking group (—S—S—). To determine if a candidate cleavable linking group is a suitable “reductively cleavable linking group,” or for example is suitable for use with a particular iRNA moiety and particular targeting agent one can look to methods described herein. For example, a candidate can be evaluated by incubation with dithiothreitol (DTT), or other reducing agent using reagents know in the art, which mimic the rate of cleavage which would be observed in a cell, e.g., a target cell. The candidates can also be evaluated under conditions which are selected to mimic blood or serum conditions. In one, candidate compounds are cleaved by at most about 10% in the blood. In other embodiments, useful candidate compounds are degraded at least about 2, 4, 10, 20, 30, 40, 50, 60, 70, 80, 90, or about 100 times faster in the cell (or under in vitro conditions selected to mimic intracellular conditions) as compared to blood (or under in vitro conditions selected to mimic extracellular conditions). The rate of cleavage of candidate compounds can be determined using standard enzyme kinetics assays under conditions chosen to mimic intracellular media and compared to conditions chosen to mimic extracellular media.

### Phosphate-Based Cleavable Linking Groups

[0369] In another embodiment, a cleavable linker comprises a phosphate-based cleavable linking group. A phosphate-based cleavable linking group is cleaved by agents that degrade or hydrolyze the phosphate group. An example of an agent that cleaves phosphate groups in cells are enzymes such as phosphatases in cells. Examples of phosphate-based linking groups are —O—P(O)(ORk)-O—, —O—P(S)(ORk)-O—, —O—P(S)(SRk)-O—, —S—P(O)(ORk)-O—, —O—P(O)(ORk)-S—, —S—P(O)(ORk)-S—, —O—P(S)(ORk)-S—, —S—P(S)(ORk)-O—, —O—P(O)(Rk)-O—, —O—P(S)(Rk)-O—, —S—P(O)(Rk)-O—, —S—P(S)(Rk)-O—, —S—P(O)(Rk)-S—, —O—P(S)(Rk)-S—. Preferred embodiments are —O—P(O)(OH)—O—, —O—P(S)(OH)—O—, —O—P(S)(SH)—O—, —S—P(O)(OH)—O—, —O—P(O)(OH)—S—, —S—P(O)(OH)—S—, —O—P(S)(OH)—S—, —S—P(S)(OH)—O—, —O—P(O)(H)—O—, —O—P(S)(H)—O—, —S—P(O)(H)—O, —S—P(S)(H)—O—, —S—P(O)(H)—S—, —O—P(S)(H)—S—. A preferred embodiment is —O—P(O)(OH)—O—. These candidates can be evaluated using methods analogous to those described above.

### Acid Cleavable Linking Groups

[0370] In another embodiment, a cleavable linker comprises an acid cleavable linking group. An acid cleavable linking group is a linking group that is cleaved under acidic conditions. In preferred embodiments acid cleavable linking groups are cleaved in an acidic environment with a pH of about 6.5 or lower (e.g., about 6.0, 5.75, 5.5, 5.25, 5.0, or lower), or by agents such as enzymes that can act as a general acid. In a cell, specific low pH organelles, such as endosomes and lysosomes can provide a cleaving environment for acid cleavable linking groups. Examples of acid cleavable linking groups include but are not limited to hydrazones, esters, and esters of amino acids. Acid cleavable groups can have the general formula —C═NN—, C(O)O, or —OC(O). A preferred embodiment is when the carbon attached to the oxygen of the ester (the alkoxy group) is an aryl group, substituted alkyl group, or tertiary alkyl group such as dimethyl pentyl or t-butyl. These candidates can be evaluated using methods analogous to those described above.

### Ester-Based Cleavable Linking Groups

[0371] In another embodiment, a cleavable linker comprises an ester-based cleavable linking group. An ester-based cleavable linking group is cleaved by enzymes such as esterases and amidases in cells. Examples of ester-based cleavable linking groups include but are not limited to esters of alkylene, alkenylene and alkynylene groups. Ester cleavable linking groups have the general formula —C(O)O—, or —OC(O)—. These candidates can be evaluated using methods analogous to those described above.

### Peptide-Based Cleavable Linking Groups

[0372] In yet another embodiment, a cleavable linker comprises a peptide-based cleavable linking group. A peptide-based cleavable linking group is cleaved by enzymes such as peptidases and proteases in cells. Peptide-based cleavable linking groups are peptide bonds formed between amino acids to yield oligopeptides (e.g., dipeptides, tripeptides etc.) and polypeptides. Peptide-based cleavable groups do not include the amide group (—C(O)NH—). The amide group can be formed between any alkylene, alkenylene or alkynelene. A peptide bond is a special type of amide bond formed between amino acids to yield peptides and proteins. The peptide-based cleavage group is generally limited to the peptide bond (i.e., the amide bond) formed between amino acids yielding peptides and proteins and does not include the entire amide functional group. Peptide-based cleavable linking groups have the general formula —NHCHRAC(O)NHCHRBC(O)—, where RA and RB are the R groups of the two adjacent amino acids. These candidates can be evaluated using methods analogous to those described above. Representative U.S. patents that teach the preparation of RNA conjugates include, but are not limited to, U.S. Pat. Nos. 4,828,979; 4,948,882; 5,218,105; 5,525,465; 5,541,313; 5,545,730; 5,552,538; 5,578,717, 5,580,731; 5,591,584; 5,109,124; 5,118,802; 5,138,045; 5,414,077; 5,486,603; 5,512,439; 5,578,718; 5,608,046; 4,587,044; 4,605,735; 4,667,025; 4,762,779; 4,789,737; 4,824,941; 4,835,263; 4,876,335; 4,904,582; 4,958,013; 5,082,830; 5,112,963; 5,214,136; 5,082,830; 5,112,963; 5,214,136; 5,245,022; 5,254,469; 5,258,506; 5,262,536; 5,272,250; 5,292,873; 5,317,098; 5,371,241, 5,391,723; 5,416,203, 5,451,463; 5,510,475; 5,512,667; 5,514,785; 5,565,552; 5,567,810; 5,574,142; 5,585,481; 5,587,371; 5,595,726; 5,597,696; 5,599,923; 5,599,928 and 5,688,941; 6,294,664; 6,320,017; 6,576,752; 6,783,931; 6,900,297; 7,037,646; 8,106,022, the entire contents of each of which is herein incorporated by reference.

[0373] It is not necessary for all positions in a given compound to be uniformly modified, and in fact more than one of the aforementioned modifications may be incorporated in a single compound or even at a single nucleoside within an iRNA. The present disclosure also includes iRNA compounds that are chimeric compounds.

[0374] “Chimeric” iRNA compounds, or “chimeras,” in the context of the present disclosure, are iRNA compounds, e.g., dsRNAs, that contain two or more chemically distinct regions, each made up of at least one monomer unit, i.e., a nucleotide in the case of a dsRNA compound. These iRNAs typically contain at least one region wherein the RNA is modified so as to confer upon the iRNA increased resistance to nuclease degradation, increased cellular uptake, and/or increased binding affinity for the target nucleic acid. An additional region of the iRNA may serve as a substrate for enzymes capable of cleaving RNA:DNA or RNA:RNA hybrids. By way of example, RNase H is a cellular endonuclease which cleaves the RNA strand of an RNA:DNA duplex. Activation of RNase H, therefore, results in cleavage of the RNA target, thereby greatly enhancing the efficiency of iRNA inhibition of gene expression. Consequently, comparable results can often be obtained with shorter iRNAs when chimeric dsRNAs are used, compared to phosphorothioate deoxy dsRNAs hybridizing to the same target region. Cleavage of the RNA target can be routinely detected by gel electrophoresis and, if necessary, associated nucleic acid hybridization techniques known in the art.

[0375] In certain instances, the RNA of an iRNA can be modified by a non-ligand group. A number of non-ligand molecules have been conjugated to iRNAs in order to enhance the activity, cellular distribution or cellular uptake of the iRNA, and procedures for performing such conjugations are available in the scientific literature. Such non-ligand moieties have included lipid moieties, such as cholesterol (Kubo, T. et al., Biochem. Biophys. Res. Comm., 2007, 365(1):54-61; Letsinger et al., Proc. Natl. Acad. Sci. USA, 1989, 86:6553), cholic acid (Manoharan et al., Bioorg. Med. Chem. Lett., 1994, 4:1053), a thioether, e.g., hexyl-S-tritylthiol (Manoharan et al., Ann. N.Y. Acad. Sci., 1992, 660:306; Manoharan et al., Bioorg. Med. Chem. Let., 1993, 3:2765), a thiocholesterol (Oberhauser et al., Nucl. Acids Res., 1992, 20:533), an aliphatic chain, e.g., dodecandiol or undecyl residues (Saison-Behmoaras et al., EMBO J., 1991, 10:111; Kabanov et al., FEBS Lett., 1990, 259:327; Svinarchuk et al., Biochimie, 1993, 75:49), a phospholipid, e.g., di-hexadecyl-rac-glycerol or triethylammonium 1,2-di-O-hexadecyl-rac-glycero-3-H-phosphonate (Manoharan et al., Tetrahedron Lett., 1995, 36:3651; Shea et al., Nucl. Acids Res., 1990, 18:3777), a polyamine or a polyethylene glycol chain (Manoharan et al., Nucleosides & Nucleotides, 1995, 14:969), or adamantane acetic acid (Manoharan et al., Tetrahedron Lett., 1995, 36:3651), a palmityl moiety (Mishra et al., Biochim. Biophys. Acta, 1995, 1264:229), or an octadecylamine or hexylamino-carbonyl-oxycholesterol moiety (Crooke et al., J. Pharmacol. Exp. Ther., 1996, 277:923). Representative United States patents that teach the preparation of such RNA conjugates have been listed above. Typical conjugation protocols involve the synthesis of an RNAs bearing an aminolinker at one or more positions of the sequence. The amino group is then reacted with the molecule being conjugated using appropriate coupling or activating reagents. The conjugation reaction may be performed either with the RNA still bound to the solid support or following cleavage of the RNA, in solution phase. Purification of the RNA conjugate by HPLC typically affords the pure conjugate.

Delivery of iRNA

[0376] The delivery of an iRNA to a subject in need thereof can be achieved in a number of different ways. In vivo delivery can be performed directly by administering a composition comprising an iRNA, e.g. a dsRNA, to a subject. Alternatively, delivery can be performed indirectly by administering one or more vectors that encode and direct the expression of the iRNA. These alternatives are discussed further below.

### Direct Delivery

[0377] In general, any method of delivering a nucleic acid molecule can be adapted for use with an iRNA (see e.g., Akhtar S. and Julian R L. (1992) Trends Cell. Biol. 2(5):139-144 and WO94/02595, which are incorporated herein by reference in their entireties). However, there are three factors that are important to consider in order to successfully deliver an iRNA molecule in vivo: (a) biological stability of the delivered molecule, (2) preventing non-specific effects, and (3) accumulation of the delivered molecule in the target tissue. The non-specific effects of an iRNA can be minimized by local administration, for example by direct injection or implantation into a tissue (as a non-limiting example, a tumor) or topically administering the preparation. Local administration to a treatment site maximizes local concentration of the agent, limits the exposure of the agent to systemic tissues that may otherwise be harmed by the agent or that may degrade the agent, and permits a lower total dose of the iRNA molecule to be administered. Several studies have shown successful knockdown of gene products when an iRNA is administered locally. For example, intraocular delivery of a VEGF dsRNA by intravitreal injection in cynomolgus monkeys (Tolentino, M J., et al (2004) Retina 24:132-138) and subretinal injections in mice (Reich, S J., et al (2003) Mol. Vis. 9:210-216) were both shown to prevent neovascularization in an experimental model of age-related macular degeneration. In addition, direct intratumoral injection of a dsRNA in mice reduces tumor volume (Pille, J., et al (2005) Mol. Ther.11:267-274) and can prolong survival of tumor-bearing mice (Kim, W J., et al (2006) Mol. Ther. 14:343-350; Li, S., et al (2007) Mol. Ther. 15:515-523). RNA interference has also shown success with local delivery to the CNS by direct injection (Dorn, G., et al. (2004) Nucleic Acids 32:e49; Tan, P H., et al (2005) Gene Ther. 12:59-66; Makimura, H., et al (2002) BMC Neurosci. 3:18; Shishkina, G T., et al (2004) Neuroscience 129:521-528; Thakker, E R., et al (2004) Proc. Natl. Acad. Sci. U.S.A. 101:17270-17275; Akaneya, Y., et al (2005) J. Neurophysiol. 93:594-602) and to the lungs by intranasal administration (Howard, K A., et al (2006) Mol. Ther. 14:476-484; Zhang, X., et al (2004) J. Biol. Chem. 279:10677-10684; Bitko, V., et al (2005) Nat. Med. 11:50-55). For administering an iRNA systemically for the treatment of a disease, the RNA can be modified or alternatively delivered using a drug delivery system; both methods act to prevent the rapid degradation of the dsRNA by endo- and exo-nucleases in vivo.

[0378] Modification of the RNA or the pharmaceutical carrier can also permit targeting of the iRNA composition to the target tissue and avoid undesirable off-target effects. iRNA molecules can be modified by chemical conjugation to other groups, e.g., a lipid or carbohydrate group as described herein. Such conjugates can be used to target iRNA to particular cells, e.g., liver cells, e.g., hepatocytes. For example, GalNAc conjugates or lipid (e.g., LNP) formulations can be used to target iRNA to particular cells, e.g., liver cells, e.g., hepatocytes.

[0379] Lipophilic groups such as cholesterol to enhance cellular uptake and prevent degradation. For example, an iRNA directed against ApoB conjugated to a lipophilic cholesterol moiety was injected systemically into mice and resulted in knockdown of apoB mRNA in both the liver and jejunum (Soutschek, J., et al (2004) Nature 432:173-178). Conjugation of an iRNA to an aptamer has been shown to inhibit tumor growth and mediate tumor regression in a mouse model of prostate cancer (McNamara, J O., et al (2006) Nat. Biotechnol. 24:1005-1015). In an alternative embodiment, the iRNA can be delivered using drug delivery systems such as a nanoparticle, a dendrimer, a polymer, liposomes, or a cationic delivery system. Positively charged cationic delivery systems facilitate binding of an iRNA molecule (negatively charged) and also enhance interactions at the negatively charged cell membrane to permit efficient uptake of an iRNA by the cell. Cationic lipids, dendrimers, or polymers can either be bound to an iRNA, or induced to form a vesicle or micelle (see e.g., Kim S H., et al (2008) Journal of Controlled Release 129(2):107-116) that encases an iRNA. The formation of vesicles or micelles further prevents degradation of the iRNA when administered systemically. Methods for making and administering cationic-iRNA complexes are well within the abilities of one skilled in the art (see e.g., Sorensen, D R., et al (2003) J. Mol. Biol 327:761-766; Verma, U N., et al (2003) Clin. Cancer Res. 9:1291-1300; Arnold, A S et al (2007) J. Hypertens. 25:197-205, which are incorporated herein by reference in their entirety). Some non-limiting examples of drug delivery systems useful for systemic delivery of iRNAs include DOTAP (Sorensen, D R., et al (2003), supra; Verma, U N., et al (2003), supra), Oligofectamine, “solid nucleic acid lipid particles” (Zimmermann, T S., et al (2006) Nature 441:111-114), cardiolipin (Chien, P Y., et al (2005) Cancer Gene Ther. 12:321-328; Pal, A., et al (2005) Int J. Oncol. 26:1087-1091), polyethyleneimine (Bonnet M E., et al (2008) Pharm. Res. August 16 Epub ahead of print; Aigner, A. (2006) J. Biomed. Biotechnol. 71659), Arg-Gly-Asp (RGD) peptides (Liu, S. (2006) Mol. Pharm. 3:472-487), and polyamidoamines (Tomalia, D A., et al (2007) Biochem. Soc. Trans. 35:61-67; Yoo, H., et al (1999) Pharm. Res. 16:1799-1804). In some embodiments, an iRNA forms a complex with cyclodextrin for systemic administration. Methods for administration and pharmaceutical compositions of iRNAs and cyclodextrins can be found in U.S. Pat. No. 7,427,605, which is herein incorporated by reference in its entirety.

Vector Encoded iRNAs

[0380] In another aspect, iRNA targeting the LECT2 gene can be expressed from transcription units inserted into DNA or RNA vectors (see, e.g., Couture, A, et al., TIG. (1996), 12:5-10; Skillern, A., et al., International PCT Publication No. WO 00/22113, Conrad, International PCT Publication No. WO 00/22114, and Conrad, U.S. Pat. No. 6,054,299). Expression can be transient (on the order of hours to weeks) or sustained (weeks to months or longer), depending upon the specific construct used and the target tissue or cell type. These transgenes can be introduced as a linear construct, a circular plasmid, or a viral vector, which can be an integrating or non-integrating vector. The transgene can also be constructed to permit it to be inherited as an extrachromosomal plasmid (Gassmann, et al., Proc. Natl. Acad. Sci. USA (1995) 92:1292).

[0381] The individual strand or strands of an iRNA can be transcribed from a promoter on an expression vector. Where two separate strands are to be expressed to generate, for example, a dsRNA, two separate expression vectors can be co-introduced (e.g., by transfection or infection) into a target cell. Alternatively each individual strand of a dsRNA can be transcribed by promoters both of which are located on the same expression plasmid. In one embodiment, a dsRNA is expressed as an inverted repeat joined by a linker polynucleotide sequence such that the dsRNA has a stem and loop structure.

[0382] An iRNA expression vector is typically a DNA plasmid or viral vector. An expression vector compatible with eukaryotic cells, e.g., with vertebrate cells, can be used to produce recombinant constructs for the expression of an iRNA as described herein. Eukaryotic cell expression vectors are well known in the art and are available from a number of commercial sources. Typically, such vectors contain convenient restriction sites for insertion of the desired nucleic acid segment. Delivery of iRNA expressing vectors can be systemic, such as by intravenous or intramuscular administration, by administration to target cells ex-planted from the patient followed by reintroduction into the patient, or by any other means that allows for introduction into a desired target cell.

[0383] An iRNA expression plasmid can be transfected into a target cell as a complex with a cationic lipid carrier (e.g., Oligofectamine) or a non-cationic lipid-based carrier (e.g., Transit-TKO™). Multiple lipid transfections for iRNA-mediated knockdowns targeting different regions of a target RNA over a period of a week or more are also contemplated by the disclosure. Successful introduction of vectors into host cells can be monitored using various known methods. For example, transient transfection can be signaled with a reporter, such as a fluorescent marker, such as Green Fluorescent Protein (GFP). Stable transfection of cells ex vivo can be ensured using markers that provide the transfected cell with resistance to specific environmental factors (e.g., antibiotics and drugs), such as hygromycin B resistance.

[0384] Viral vector systems which can be utilized with the methods and compositions described herein include, but are not limited to, (a) adenovirus vectors; (b) retrovirus vectors, including but not limited to lentiviral vectors, moloney murine leukemia virus, etc.; (c) adeno-associated virus vectors; (d) herpes simplex virus vectors; (e) SV40 vectors; (f) polyoma virus vectors; (g) papilloma virus vectors; (h) picornavirus vectors; (i) pox virus vectors such as an orthopox, e.g., vaccinia virus vectors or avipox, e.g. canary pox or fowl pox; and (j) a helper-dependent or gutless adenovirus. Replication-defective viruses can also be advantageous. Different vectors will or will not become incorporated into the cells' genome. The constructs can include viral sequences for transfection, if desired. Alternatively, the construct may be incorporated into vectors capable of episomal replication, e.g EPV and EBV vectors. Constructs for the recombinant expression of an iRNA will generally require regulatory elements, e.g., promoters, enhancers, etc., to ensure the expression of the iRNA in target cells. Other aspects to consider for vectors and constructs are further described below.

[0385] Vectors useful for the delivery of an iRNA will include regulatory elements (promoter, enhancer, etc.) sufficient for expression of the iRNA in the desired target cell or tissue. The regulatory elements can be chosen to provide either constitutive or regulated/inducible expression.

[0386] Expression of the iRNA can be precisely regulated, for example, by using an inducible regulatory sequence that is sensitive to certain physiological regulators, e.g., circulating glucose levels, or hormones (Docherty et al., 1994, FASEB J. 8:20-24). Such inducible expression systems, suitable for the control of dsRNA expression in cells or in mammals include, for example, regulation by ecdysone, by estrogen, progesterone, tetracycline, chemical inducers of dimerization, and isopropyl-β-D1-thiogalactopyranoside (IPTG). A person skilled in the art would be able to choose the appropriate regulatory/promoter sequence based on the intended use of the iRNA transgene.

[0387] In a specific embodiment, viral vectors that contain nucleic acid sequences encoding an iRNA can be used. For example, a retroviral vector can be used (see Miller et al., Meth. Enzymol. 217:581-599 (1993)). These retroviral vectors contain the components necessary for the correct packaging of the viral genome and integration into the host cell DNA. The nucleic acid sequences encoding an iRNA are cloned into one or more vectors, which facilitates delivery of the nucleic acid into a patient. More detail about retroviral vectors can be found, for example, in Boesen et al., Biotherapy 6:291-302 (1994), which describes the use of a retroviral vector to deliver the mdr1 gene to hematopoietic stem cells in order to make the stem cells more resistant to chemotherapy. Other references illustrating the use of retroviral vectors in gene therapy are: Clowes et al., J. Clin. Invest. 93:644-651 (1994); Kiem et al., Blood 83:1467-1473 (1994); Salmons and Gunzberg, Human Gene Therapy 4:129-141 (1993); and Grossman and Wilson, Curr. Opin. in Genetics and Devel. 3:110-114 (1993). Lentiviral vectors contemplated for use include, for example, the HIV based vectors described in U.S. Pat. Nos. 6,143,520; 5,665,557; and 5,981,276, which are herein incorporated by reference.

[0388] Adenoviruses are also contemplated for use in delivery of iRNAs. Adenoviruses are especially attractive vehicles, e.g., for delivering genes to respiratory epithelia. Adenoviruses naturally infect respiratory epithelia where they cause a mild disease. Other targets for adenovirus-based delivery systems are liver, the central nervous system, endothelial cells, and muscle. Adenoviruses have the advantage of being capable of infecting non-dividing cells. Kozarsky and Wilson, Current Opinion in Genetics and Development 3:499-503 (1993) present a review of adenovirus-based gene therapy. Bout et al., Human Gene Therapy 5:3-10 (1994) demonstrated the use of adenovirus vectors to transfer genes to the respiratory epithelia of rhesus monkeys. Other instances of the use of adenoviruses in gene therapy can be found in Rosenfeld et al., Science 252:431-434 (1991); Rosenfeld et al., Cell 68:143-155 (1992); Mastrangeli et al., J. Clin. Invest. 91:225-234 (1993); PCT Publication WO94/12649; and Wang, et al., Gene Therapy 2:775-783 (1995). A suitable AV vector for expressing an iRNA featured in the disclosure, a method for constructing the recombinant AV vector, and a method for delivering the vector into target cells, are described in Xia H et al. (2002), Nat. Biotech. 20: 1006-1010.

[0389] Use of Adeno-associated virus (AAV) vectors is also contemplated (Walsh et al., Proc. Soc. Exp. Biol. Med. 204:289-300 (1993); U.S. Pat. No. 5,436,146). In one embodiment, the iRNA can be expressed as two separate, complementary single-stranded RNA molecules from a recombinant AAV vector having, for example, either the U6 or H1 RNA promoters, or the cytomegalovirus (CMV) promoter. Suitable AAV vectors for expressing the dsRNA featured in the disclosure, methods for constructing the recombinant AV vector, and methods for delivering the vectors into target cells are described in Samulski R et al. (1987), J. Virol. 61: 3096-3101; Fisher K J et al. (1996), J. Virol., 70: 520-532; Samulski R et al. (1989), J. Virol. 63: 3822-3826; U.S. Pat. Nos. 5,252,479; 5,139,941; International Patent Application No. WO 94/13788; and International Patent Application No. WO 93/24641, the entire disclosures of which are herein incorporated by reference.

[0390] Another typical viral vector is a pox virus such as a vaccinia virus, for example an attenuated vaccinia such as Modified Virus Ankara (MVA) or NYVAC, an avipox such as fowl pox or canary pox.

[0391] The tropism of viral vectors can be modified by pseudotyping the vectors with envelope proteins or other surface antigens from other viruses, or by substituting different viral capsid proteins, as appropriate. For example, lentiviral vectors can be pseudotyped with surface proteins from vesicular stomatitis virus (VSV), rabies, Ebola, Mokola, and the like. AAV vectors can be made to target different cells by engineering the vectors to express different capsid protein serotypes; see, e.g., Rabinowitz J E et al. (2002), J Virol 76:791-801, the entire disclosure of which is herein incorporated by reference.

[0392] The pharmaceutical preparation of a vector can include the vector in an acceptable diluent, or can include a slow release matrix in which the gene delivery vehicle is imbedded. Alternatively, where the complete gene delivery vector can be produced intact from recombinant cells, e.g., retroviral vectors, the pharmaceutical preparation can include one or more cells which produce the gene delivery system.

### III. Pharmaceutical Compositions Containing iRNA

[0393] In one embodiment, the disclosure provides pharmaceutical compositions containing an iRNA, as described herein, and a pharmaceutically acceptable carrier. The pharmaceutical composition containing the iRNA is useful for treating a disease or disorder related to the expression or activity of a LECT2 gene (e.g., a LECT2 amyloidosis). Such pharmaceutical compositions are formulated based on the mode of delivery. For example, compositions can be formulated for systemic administration via parenteral delivery, e.g., by intravenous (IV) delivery. In some embodiments, a composition provided herein (e.g., an LNP formulation) is formulated for intravenous delivery. In some embodiments, a composition provided herein (e.g., a composition comprising a GalNAc conjugate) is formulated for subcutaneous delivery.

[0394] The pharmaceutical compositions featured herein are administered in a dosage sufficient to inhibit expression of a LECT2 gene. In general, a suitable dose of iRNA will be in the range of 0.01 to 200.0 milligrams per kilogram body weight of the recipient per day, generally in the range of 1 to 50 mg per kilogram body weight per day. For example, the dsRNA can be administered at 0.05 mg/kg, 0.5 mg/kg, 1 mg/kg, 1.5 mg/kg, 2 mg/kg, 3 mg/kg, 10 mg/kg, 20 mg/kg, 30 mg/kg, 40 mg/kg, or 50 mg/kg per single dose. The pharmaceutical composition may be administered once daily, or the iRNA may be administered as two, three, or more sub-doses at appropriate intervals throughout the day or even using continuous infusion or delivery through a controlled release formulation. In that case, the iRNA contained in each sub-dose must be correspondingly smaller in order to achieve the total daily dosage. The dosage unit can also be compounded for delivery over several days, e.g., using a conventional sustained release formulation which provides sustained release of the iRNA over a several day period. Sustained release formulations are well known in the art and are particularly useful for delivery of agents at a particular site, such as can be used with the agents of the present disclosure. In this embodiment, the dosage unit contains a corresponding multiple of the daily dose.

[0395] The effect of a single dose on LECT2 levels can be long lasting, such that subsequent doses are administered at not more than 3, 4, or 5-day intervals, or at not more than 1, 2, 3, or 4 week intervals.

[0396] The skilled artisan will appreciate that certain factors may influence the dosage and timing required to effectively treat a subject, including but not limited to the severity of the disease or disorder, previous treatments, the general health and/or age of the subject, and other diseases present. Moreover, treatment of a subject with a therapeutically effective amount of a composition can include a single treatment or a series of treatments. Estimates of effective dosages and in vivo half-lives for the individual iRNAs encompassed by the disclosure can be made using conventional methodologies or on the basis of in vivo testing using a suitable animal model.

[0397] A suitable animal model, e.g., a mouse containing a transgene expressing human LECT2, can be used to determine the therapeutically effective dose and/or an effective dosage regimen administration of LECT2 siRNA.

[0398] The present disclosure also includes pharmaceutical compositions and formulations that include the iRNA compounds featured herein. The pharmaceutical compositions of the present disclosure may be administered in a number of ways depending upon whether local or systemic treatment is desired and upon the area to be treated. Administration may be topical (e.g., by a transdermal patch), pulmonary, e.g., by inhalation or insufflation of powders or aerosols, including by nebulizer; intratracheal, intranasal, epidermal and transdermal, oral or parenteral. Parenteral administration includes intravenous, intraarterial, subcutaneous, intraperitoneal or intramuscular injection or infusion; subdermal, e.g., via an implanted device; or intracranial, e.g., by intraparenchymal, intrathecal or intraventricular, administration.

[0399] The iRNA can be delivered in a manner to target a particular tissue, such as a tissue that produces erythrocytes. For example, the iRNA can be delivered to bone marrow, liver (e.g., hepatocyes of liver), lymph glands, spleen, lungs (e.g., pleura of lungs) or spine. In one embodiment, the iRNA is delivered to bone marrow.

[0400] Pharmaceutical compositions and formulations for topical administration may include transdermal patches, ointments, lotions, creams, gels, drops, suppositories, sprays, liquids and powders. Conventional pharmaceutical carriers, aqueous, powder or oily bases, thickeners and the like may be necessary or desirable. Coated condoms, gloves and the like may also be useful. Suitable topical formulations include those in which the iRNAs featured in the disclosure are in admixture with a topical delivery agent such as lipids, liposomes, fatty acids, fatty acid esters, steroids, chelating agents and surfactants. Suitable lipids and liposomes include neutral (e.g., dioleoylphosphatidyl DOPE ethanolamine, dimyristoylphosphatidyl choline DMPC, distearolyphosphatidyl choline) negative (e.g., dimyristoylphosphatidyl glycerol DMPG) and cationic (e.g., dioleoyltetramethylaminopropyl DOTAP and dioleoylphosphatidyl ethanolamine DOTMA). iRNAs featured in the disclosure may be encapsulated within liposomes or may form complexes thereto, in particular to cationic liposomes. Alternatively, iRNAs may be complexed to lipids, in particular to cationic lipids. Suitable fatty acids and esters include but are not limited to arachidonic acid, oleic acid, eicosanoic acid, lauric acid, caprylic acid, capric acid, myristic acid, palmitic acid, stearic acid, linoleic acid, linolenic acid, dicaprate, tricaprate, monoolein, dilaurin, glyceryl 1-monocaprate, 1-dodecylazacycloheptan-2-one, an acylcarnitine, an acylcholine, or a C₁₋₂₀ alkyl ester (e.g., isopropylmyristate IPM), monoglyceride, diglyceride or pharmaceutically acceptable salt thereof. Topical formulations are described in detail in U.S. Pat. No. 6,747,014, which is incorporated herein by reference.

### Liposomal Formulations

[0401] There are many organized surfactant structures besides microemulsions that have been studied and used for the formulation of drugs. These include monolayers, micelles, bilayers and vesicles. Vesicles, such as liposomes, have attracted great interest because of their specificity and the duration of action they offer from the standpoint of drug delivery. As used in the present disclosure, the term “liposome” means a vesicle composed of amphiphilic lipids arranged in a spherical bilayer or bilayers.

[0402] Liposomes are unilamellar or multilamellar vesicles which have a membrane formed from a lipophilic material and an aqueous interior. The aqueous portion contains the composition to be delivered. Cationic liposomes possess the advantage of being able to fuse to the cell wall. Non-cationic liposomes, although not able to fuse as efficiently with the cell wall, are taken up by macrophages in vivo.

[0403] In order to traverse intact mammalian skin, lipid vesicles must pass through a series of fine pores, each with a diameter less than 50 nm, under the influence of a suitable transdermal gradient. Therefore, it is desirable to use a liposome which is highly deformable and able to pass through such fine pores.

[0404] Further advantages of liposomes include; liposomes obtained from natural phospholipids are biocompatible and biodegradable; liposomes can incorporate a wide range of water and lipid soluble drugs; liposomes can protect encapsulated drugs in their internal compartments from metabolism and degradation (Rosoff, in Pharmaceutical Dosage Forms, Lieberman, Rieger and Banker (Eds.), 1988, Marcel Dekker, Inc., New York, N.Y., volume 1, p. 245). Important considerations in the preparation of liposome formulations are the lipid surface charge, vesicle size and the aqueous volume of the liposomes.

[0405] Liposomes are useful for the transfer and delivery of active ingredients to the site of action. Because the liposomal membrane is structurally similar to biological membranes, when liposomes are applied to a tissue, the liposomes start to merge with the cellular membranes and as the merging of the liposome and cell progresses, the liposomal contents are emptied into the cell where the active agent may act.

[0406] Liposomal formulations have been the focus of extensive investigation as the mode of delivery for many drugs. There is growing evidence that for topical administration, liposomes present several advantages over other formulations. Such advantages include reduced side-effects related to high systemic absorption of the administered drug, increased accumulation of the administered drug at the desired target, and the ability to administer a wide variety of drugs, both hydrophilic and hydrophobic, into the skin.

[0407] Several reports have detailed the ability of liposomes to deliver agents including high-molecular weight DNA into the skin. Compounds including analgesics, antibodies, hormones and high-molecular weight DNAs have been administered to the skin. The majority of applications resulted in the targeting of the upper epidermis

[0408] Liposomes fall into two broad classes. Cationic liposomes are positively charged liposomes which interact with the negatively charged DNA molecules to form a stable complex. The positively charged DNA/liposome complex binds to the negatively charged cell surface and is internalized in an endosome. Due to the acidic pH within the endosome, the liposomes are ruptured, releasing their contents into the cell cytoplasm (Wang et al., Biochem. Biophys. Res. Commun., 1987, 147, 980-985).

[0409] Liposomes which are pH-sensitive or negatively-charged, entrap DNA rather than complex with it. Since both the DNA and the lipid are similarly charged, repulsion rather than complex formation occurs. Nevertheless, some DNA is entrapped within the aqueous interior of these liposomes. pH-sensitive liposomes have been used to deliver DNA encoding the thymidine kinase gene to cell monolayers in culture. Expression of the exogenous gene was detected in the target cells (Zhou et al., Journal of Controlled Release, 1992, 19, 269-274).

[0410] One major type of liposomal composition includes phospholipids other than naturally-derived phosphatidylcholine. Neutral liposome compositions, for example, can be formed from dimyristoyl phosphatidylcholine (DMPC) or dipalmitoyl phosphatidylcholine (DPPC). Anionic liposome compositions generally are formed from dimyristoyl phosphatidylglycerol, while anionic fusogenic liposomes are formed primarily from dioleoyl phosphatidylethanolamine (DOPE). Another type of liposomal composition is formed from phosphatidylcholine (PC) such as, for example, soybean PC, and egg PC. Another type is formed from mixtures of phospholipid and/or phosphatidylcholine and/or cholesterol.

[0411] Several studies have assessed the topical delivery of liposomal drug formulations to the skin. Application of liposomes containing interferon to guinea pig skin resulted in a reduction of skin herpes sores while delivery of interferon via other means (e.g., as a solution or as an emulsion) were ineffective (Weiner et al., Journal of Drug Targeting, 1992, 2, 405-410). Further, an additional study tested the efficacy of interferon administered as part of a liposomal formulation to the administration of interferon using an aqueous system, and concluded that the liposomal formulation was superior to aqueous administration (du Plessis et al., Antiviral Research, 1992, 18, 259-265).

[0412] Non-ionic liposomal systems have also been examined to determine their utility in the delivery of drugs to the skin, in particular systems comprising non-ionic surfactant and cholesterol. Non-ionic liposomal formulations comprising Novasome™ I (glyceryl dilaurate/cholesterol/polyoxyethylene-10-stearyl ether) and Novasome™ II (glyceryl distearate/cholesterol/polyoxyethylene-10-stearyl ether) were used to deliver cyclosporin-A into the dermis of mouse skin. Results indicated that such non-ionic liposomal systems were effective in facilitating the deposition of cyclosporin-A into different layers of the skin (Hu et al. S. T. P. Pharma. Sci., 1994, 4, 6, 466).

[0413] Liposomes also include “sterically stabilized” liposomes, a term which, as used herein, refers to liposomes comprising one or more specialized lipids that, when incorporated into liposomes, result in enhanced circulation lifetimes relative to liposomes lacking such specialized lipids. Examples of sterically stabilized liposomes are those in which part of the vesicle-forming lipid portion of the liposome (A) comprises one or more glycolipids, such as monosialoganglioside G_{M1}, or (B) is derivatized with one or more hydrophilic polymers, such as a polyethylene glycol (PEG) moiety. While not wishing to be bound by any particular theory, it is thought in the art that, at least for sterically stabilized liposomes containing gangliosides, sphingomyelin, or PEG-derivatized lipids, the enhanced circulation half-life of these sterically stabilized liposomes derives from a reduced uptake into cells of the reticuloendothelial system (RES) (Allen et al., FEBS Letters, 1987, 223, 42; Wu et al., Cancer Research, 1993, 53, 3765).

[0414] Various liposomes comprising one or more glycolipids are known in the art. Papahadjopoulos et al. (Ann. N.Y. Acad. Sci., 1987, 507, 64) reported the ability of monosialoganglioside G_{M1}, galactocerebroside sulfate and phosphatidylinositol to improve blood half-lives of liposomes. These findings were expounded upon by Gabizon et al. (Proc. Natl. Acad. Sci. U.S.A., 1988, 85, 6949). U.S. Pat. No. 4,837,028 and WO 88/04924, both to Allen et al., disclose liposomes comprising (1) sphingomyelin and (2) the ganglioside G_{M1} or a galactocerebroside sulfate ester. U.S. Pat. No. 5,543,152 (Webb et al.) discloses liposomes comprising sphingomyelin. Liposomes comprising 1,2-sn-dimyristoylphosphatidylcholine are disclosed in WO 97/13499 (Lim et al).

[0415] Many liposomes comprising lipids derivatized with one or more hydrophilic polymers, and methods of preparation thereof, are known in the art. Sunamoto et al. (Bull. Chem. Soc. Jpn., 1980, 53, 2778) described liposomes comprising a nonionic detergent, 2C_{1215G}, that contains a PEG moiety. Illum et al. (FEBS Lett., 1984, 167, 79) noted that hydrophilic coating of polystyrene particles with polymeric glycols results in significantly enhanced blood half-lives. Synthetic phospholipids modified by the attachment of carboxylic groups of polyalkylene glycols (e.g., PEG) are described by Sears (U.S. Pat. Nos. 4,426,330 and 4,534,899). Klibanov et al. (FEBS Lett., 1990, 268, 235) described experiments demonstrating that liposomes comprising phosphatidylethanolamine (PE) derivatized with PEG or PEG stearate have significant increases in blood circulation half-lives. Blume et al. (Biochimica et Biophysica Acta, 1990, 1029, 91) extended such observations to other PEG-derivatized phospholipids, e.g., DSPE-PEG, formed from the combination of distearoylphosphatidylethanolamine (DSPE) and PEG. Liposomes having covalently bound PEG moieties on their external surface are described in European Patent No. EP 0 445 131 B1 and WO 90/04384 to Fisher. Liposome compositions containing 1-20 mole percent of PE derivatized with PEG, and methods of use thereof, are described by Woodle et al. (U.S. Pat. Nos. 5,013,556 and 5,356,633) and Martin et al. (U.S. Pat. No. 5,213,804 and European Patent No. EP 0 496 813 B1). Liposomes comprising a number of other lipid-polymer conjugates are disclosed in WO 91/05545 and U.S. Pat. No. 5,225,212 (both to Martin et al.) and in WO 94/20073 (Zalipsky et al.). Liposomes comprising PEG-modified ceramide lipids are described in WO 96/10391 (Choi et al). U.S. Pat. No. 5,540,935 (Miyazaki et al.) and U.S. Pat. No. 5,556,948 (Tagawa et al.) describe PEG-containing liposomes that can be further derivatized with functional moieties on their surfaces.

[0416] A number of liposomes comprising nucleic acids are known in the art. WO 96/40062 to Thierry et al. discloses methods for encapsulating high molecular weight nucleic acids in liposomes. U.S. Pat. No. 5,264,221 to Tagawa et al. discloses protein-bonded liposomes and asserts that the contents of such liposomes may include a dsRNA. U.S. Pat. No. 5,665,710 to Rahman et al. describes certain methods of encapsulating oligodeoxynucleotides in liposomes. WO 97/04787 to Love et al. discloses liposomes comprising dsRNAs targeted to the raf gene.

[0417] Transfersomes are yet another type of liposomes, and are highly deformable lipid aggregates which are attractive candidates for drug delivery vehicles. Transfersomes may be described as lipid droplets which are so highly deformable that they are easily able to penetrate through pores which are smaller than the droplet. Transfersomes are adaptable to the environment in which they are used, e.g., they are self-optimizing (adaptive to the shape of pores in the skin), self-repairing, frequently reach their targets without fragmenting, and often self-loading. To make transfersomes it is possible to add surface edge-activators, usually surfactants, to a standard liposomal composition. Transfersomes have been used to deliver serum albumin to the skin. The transfersome-mediated delivery of serum albumin has been shown to be as effective as subcutaneous injection of a solution containing serum albumin.

[0418] Surfactants find wide application in formulations such as emulsions (including microemulsions) and liposomes. The most common way of classifying and ranking the properties of the many different types of surfactants, both natural and synthetic, is by the use of the hydrophile/lipophile balance (HLB). The nature of the hydrophilic group (also known as the “head”) provides the most useful means for categorizing the different surfactants used in formulations (Rieger, in Pharmaceutical Dosage Forms, Marcel Dekker, Inc., New York, N.Y., 1988, p. 285).

[0419] If the surfactant molecule is not ionized, it is classified as a nonionic surfactant. Nonionic surfactants find wide application in pharmaceutical and cosmetic products and are usable over a wide range of pH values. In general their HLB values range from 2 to about 18 depending on their structure. Nonionic surfactants include nonionic esters such as ethylene glycol esters, propylene glycol esters, glyceryl esters, polyglyceryl esters, sorbitan esters, sucrose esters, and ethoxylated esters. Nonionic alkanolamides and ethers such as fatty alcohol ethoxylates, propoxylated alcohols, and ethoxylated/propoxylated block polymers are also included in this class. The polyoxyethylene surfactants are the most popular members of the nonionic surfactant class.

[0420] If the surfactant molecule carries a negative charge when it is dissolved or dispersed in water, the surfactant is classified as anionic. Anionic surfactants include carboxylates such as soaps, acyl lactylates, acyl amides of amino acids, esters of sulfuric acid such as alkyl sulfates and ethoxylated alkyl sulfates, sulfonates such as alkyl benzene sulfonates, acyl isethionates, acyl taurates and sulfosuccinates, and phosphates. The most important members of the anionic surfactant class are the alkyl sulfates and the soaps.

[0421] If the surfactant molecule carries a positive charge when it is dissolved or dispersed in water, the surfactant is classified as cationic. Cationic surfactants include quaternary ammonium salts and ethoxylated amines. The quaternary ammonium salts are the most used members of this class.

[0422] If the surfactant molecule has the ability to carry either a positive or negative charge, the surfactant is classified as amphoteric. Amphoteric surfactants include acrylic acid derivatives, substituted alkylamides, N-alkylbetaines and phosphatides.

[0423] The use of surfactants in drug products, formulations and in emulsions has been reviewed (Rieger, in Pharmaceutical Dosage Forms, Marcel Dekker, Inc., New York, N.Y., 1988, p. 285).

### Nucleic Acid Lipid Particles

[0424] In one embodiment, a LECT2 dsRNA featured in the disclosure is fully encapsulated in the lipid formulation, e.g., to form a SPLP, pSPLP, SNALP, or other nucleic acid-lipid particle. As used herein, the term “SNALP” refers to a stable nucleic acid-lipid particle, including SPLP. As used herein, the term “SPLP” refers to a nucleic acid-lipid particle comprising plasmid DNA encapsulated within a lipid vesicle. SNALPs and SPLPs typically contain a cationic lipid, a non-cationic lipid, and a lipid that prevents aggregation of the particle (e.g., a PEG-lipid conjugate). SNALPs and SPLPs are extremely useful for systemic applications, as they exhibit extended circulation lifetimes following intravenous (i.v.) injection and accumulate at distal sites (e.g., sites physically separated from the administration site). SPLPs include “pSPLP,” which include an encapsulated condensing agent-nucleic acid complex as set forth in PCT Publication No. WO 00/03683. The particles of the present disclosure typically have a mean diameter of about 50 nm to about 150 nm, more typically about 60 nm to about 130 nm, more typically about 70 nm to about 110 nm, most typically about 70 nm to about 90 nm, and are substantially nontoxic. In addition, the nucleic acids when present in the nucleic acid-lipid particles of the present disclosure are resistant in aqueous solution to degradation with a nuclease. Nucleic acid-lipid particles and their method of preparation are disclosed in, e.g., U.S. Pat. Nos. 5,976,567; 5,981,501; 6,534,484; 6,586,410; 6,815,432; and PCT Publication No. WO 96/40964.

[0425] In one embodiment, the lipid to drug ratio (mass/mass ratio) (e.g., lipid to dsRNA ratio) will be in the range of from about 1:1 to about 50:1, from about 1:1 to about 25:1, from about 3:1 to about 15:1, from about 4:1 to about 10:1, from about 5:1 to about 9:1, or about 6:1 to about 9:1.

[0426] The cationic lipid may be, for example, N,N-dioleyl-N,N-dimethylammonium chloride (DODAC), N,N-distearyl-N,N-dimethylammonium bromide (DDAB), N-(I-(2,3-dioleoyloxy)propyl)-N,N,N-trimethylammonium chloride (DOTAP), N-(I-(2,3-dioleyloxy)propyl)-N,N,N-trimethylammonium chloride (DOTMA), N,N-dimethyl-2,3-dioleyloxy)propylamine (DODMA), 1,2-DiLinoleyloxy-N,N-dimethylaminopropane (DLinDMA), 1,2-Dilinolenyloxy-N,N-dimethylaminopropane (DLenDMA), 1,2-Dilinoleylcarbamoyloxy-3-dimethylaminopropane (DLin-C-DAP), 1,2-Dilinoleyoxy-3-(dimethylamino)acetoxypropane (DLin-DAC), 1,2-Dilinoleyoxy-3-morpholinopropane (DLin-MA), 1,2-Dilinoleoyl-3-dimethylaminopropane (DLinDAP), 1,2-Dilinoleylthio-3-dimethylaminopropane (DLin-S-DMA), 1-Linoleoyl-2-linoleyloxy-3-dimethylaminopropane 20 (DLin-2-DMAP), 1,2-Dilinoleyloxy-3-trimethylaminopropane chloride salt (DLin-TMA.Cl), 1,2-Dilinoleoyl-3-trimethylaminopropane chloride salt (DLin-TAP.Cl), 1,2-Dilinoleyloxy-3-(N-methylpiperazino)propane (DLin-MPZ), or 3-(N,N-Dilinoleylamino)-1,2-propanediol (DLinAP), 3-(N,N-Dioleylamino)-1,2-propanedio (DOAP), 1,2-Dilinoleyloxo-3-(2-N,N-dimethylamino)ethoxypropane (DLin-EG-DMA), 1,2-Dilinolenyloxy-N,N-dimethylaminopropane (DLinDMA), 2,2-Dilinoleyl-4-dimethylaminomethyl-[1,3]-dioxolane (DLin-K-DMA) or analogs thereof, (3aR,5s,6aS)-N,N-dimethyl-2,2-di((9Z,12Z)-octadeca-9,12-dienyl)tetrahydro-3aH-cyclopenta[d][1,3]dioxol-5-amine (ALN100), (6Z,9Z,28Z,31Z)-heptatriaconta-6,9,28,31-tetraen-19-yl 4-(dimethylamino)butanoate (MC3), 1,1′-(2-(4-(2-((2-(bis(2-hydroxydodecyl)amino)ethyl)(2-hydroxydodecyl)amino)ethyl)piperazin-1-yl)ethylazanediyl)didodecan-2-ol (Tech G1), or a mixture thereof. The cationic lipid may comprise from about 20 mol % to about 50 mol % or about 40 mol % of the total lipid present in the particle.

[0427] In another embodiment, the compound 2,2-Dilinoleyl-4-dimethylaminoethyl-[1,3]-dioxolane can be used to prepare lipid-siRNA nanoparticles. Synthesis of 2,2-Dilinoleyl-4-dimethylaminoethyl-[1,3]-dioxolane is described in U.S. provisional patent application No. 61/107,998 filed on Oct. 23, 2008, which is herein incorporated by reference.

[0428] In one embodiment, the lipid-siRNA particle includes 40% 2, 2-Dilinoleyl-4-dimethylaminoethyl-[1,3]-dioxolane: 10% DSPC: 40% Cholesterol: 10% PEG-C-DOMG (mole percent) with a particle size of 63.0±20 nm and a 0.027 siRNA/Lipid Ratio.

[0429] The non-cationic lipid may be an anionic lipid or a neutral lipid including, but not limited to, distearoylphosphatidylcholine (DSPC), dioleoylphosphatidylcholine (DOPC), dipalmitoylphosphatidylcholine (DPPC), dioleoylphosphatidylglycerol (DOPG), dipalmitoylphosphatidylglycerol (DPPG), dioleoyl-phosphatidylethanolamine (DOPE), palmitoyloleoylphosphatidylcholine (POPC), palmitoyloleoylphosphatidylethanolamine (POPE), dioleoyl-phosphatidylethanolamine 4-(N-maleimidomethyl)-cyclohexane-1-carboxylate (DOPE-mal), dipalmitoyl phosphatidyl ethanolamine (DPPE), dimyristoylphosphoethanolamine (DMPE), distearoyl-phosphatidyl-ethanolamine (DSPE), 16-O-monomethyl PE, 16-O-dimethyl PE, 18-1-trans PE, 1-stearoyl-2-oleoyl-phosphatidyethanolamine (SOPE), cholesterol, or a mixture thereof. The non-cationic lipid may be from about 5 mol % to about 90 mol %, about 10 mol %, or about 58 mol % if cholesterol is included, of the total lipid present in the particle.

[0430] The conjugated lipid that inhibits aggregation of particles may be, for example, a polyethyleneglycol (PEG)-lipid including, without limitation, a PEG-diacylglycerol (DAG), a PEG-dialkyloxypropyl (DAA), a PEG-phospholipid, a PEG-ceramide (Cer), or a mixture thereof. The PEG-DAA conjugate may be, for example, a PEG-dilauryloxypropyl (Ci₂), a PEG-dimyristyloxypropyl (Ci₄), a PEG-dipalmityloxypropyl (Ci₆), or a PEG-distearyloxypropyl (C]₈). The conjugated lipid that prevents aggregation of particles may be from 0 mol % to about 20 mol % or about 2 mol % of the total lipid present in the particle.

[0431] In some embodiments, the nucleic acid-lipid particle further includes cholesterol at, e.g., about 10 mol % to about 60 mol % or about 48 mol % of the total lipid present in the particle.

[0432] In some embodiments, the iRNA is formulated in a lipid nanoparticle (LNP).

### LNP01

[0433] In one embodiment, the lipidoid ND98-4HCl (MW 1487) (see U.S. patent application Ser. No. 12/056,230, filed Mar. 26, 2008, which is herein incorporated by reference), Cholesterol (Sigma-Aldrich), and PEG-Ceramide C16 (Avanti Polar Lipids) can be used to prepare lipid-dsRNA nanoparticles (e.g., LNP01 particles). Stock solutions of each in ethanol can be prepared as follows: ND98, 133 mg/ml; Cholesterol, 25 mg/ml, PEG-Ceramide C16, 100 mg/ml. The ND98, Cholesterol, and PEG-Ceramide C16 stock solutions can then be combined in a, e.g., 42:48:10 molar ratio. The combined lipid solution can be mixed with aqueous dsRNA (e.g., in sodium acetate pH 5) such that the final ethanol concentration is about 35-45% and the final sodium acetate concentration is about 100-300 mM. Lipid-dsRNA nanoparticles typically form spontaneously upon mixing. Depending on the desired particle size distribution, the resultant nanoparticle mixture can be extruded through a polycarbonate membrane (e.g., 100 nm cut-off) using, for example, a thermobarrel extruder, such as Lipex Extruder (Northern Lipids, Inc). In some cases, the extrusion step can be omitted. Ethanol removal and simultaneous buffer exchange can be accomplished by, for example, dialysis or tangential flow filtration. Buffer can be exchanged with, for example, phosphate buffered saline (PBS) at about pH 7, e.g., about pH 6.9, about pH 7.0, about pH 7.1, about pH 7.2, about pH 7.3, or about pH 7.4.

[chemical structure]

[0434] LNP01 formulations are described, e.g., in International Application Publication No. WO 2008/042973, which is hereby incorporated by reference.

[0435] Additional exemplary lipid-dsRNA formulations are provided in the following table.

TABLE 8
Exemplary lipid formulations

| | | cationic lipid/ |
|---|---|---|
| | | non-cationic |
| | | lipid/cholesterol/ |
| | | PEG-lipid conjugate |
| | Cationic Lipid | Lipid:siRNA ratio |
| SNALP | 1,2-Dilinolenyloxy-N,N- | DLinDMA/DPPC/ |
| | dimethylaminopropane (DLinDMA) | Cholesterol/ |
| | | PEG-cDMA |
| | | (57.1/7.1/34.4/1.4) |
| | | lipid:siRNA ~ 7:1 |
| S-XTC | 2,2-Dilinoleyl-4-dimethylaminoethyl- | XTC/DPPC/ |
| | [1,3]-dioxolane (XTC) | Cholesterol/ |
| | | PEG-cDMA |
| | | 57.1/7.1/34.4/1.4 |
| | | lipid:siRNA ~ 7:1 |
| LNP05 | 2,2-Dilinoleyl-4-dimethylaminoethyl- | XTC/DSPC/ |
| | [1,3]-dioxolane (XTC) | Cholesterol/ |
| | | PEG-DMG |
| | | 57.5/7.5/31.5/3.5 |
| | | lipid:siRNA ~ 6:1 |
| LNP06 | 2,2-Dilinoleyl-4-dimethylaminoethyl- | XTC/DSPC/ |
| | [1,3]-dioxolane (XTC) | Cholesterol/ |
| | | PEG-DMG |
| | | 57.5/7.5/31.5/3.5 |
| | | lipid:siRNA ~ 11:1 |
| LNP07 | 2,2-Dilinoleyl-4-dimethylaminoethyl- | XTC/DSPC/ |
| | [1,3]-dioxolane (XTC) | Cholesterol/ |
| | | PEG-DMG |
| | | 60/7.5/31/1.5, |
| | | lipid:siRNA ~ 6:1 |
| LNP08 | 2,2-Dilinoleyl-4-dimethylaminoethyl- | XTC/DSPC/ |
| | [1,3]-dioxolane (XTC) | Cholesterol/ |
| | | PEG-DMG |
| | | 60/7.5/31/1.5, |
| | | lipid:siRNA ~ 11:1 |
| LNP09 | 2,2-Dilinoleyl-4-dimethylaminoethyl- | XTC/DSPC/ |
| | [1,3]-dioxolane (XTC) | Cholesterol/ |
| | | PEG-DMG |
| | | 50/10/38.5/1.5 |
| | | Lipid:siRNA 10:1 |
| LNP10 | (3aR,5s,6aS)-N,N-dimethyl-2,2- | ALN100/DSPC/ |
| | di((9Z,12Z)-octadeca-9,12- | Cholesterol/ |
| | dienyl)tetrahydro-3aH- | PEG-DMG |
| | cyclopenta[d][l,3]dioxol-5-amine | 50/10/38.5/1.5 |
| | (ALN100) | Lipid:siRNA 10:1 |
| LNP11 | (6Z,9Z,28Z,31Z)-heptatriaconta- | MC-3/DSPC/ |
| | 6,9,28,31-tetraen-19-yl 4- | Cholesterol/ |
| | (dimethylamino)butanoate (MC3) | PEG-DMG |
| | | 50/10/38.5/1.5 |
| | | Lipid:siRNA 10:1 |
| LNP12 | 1,1′-(2-(4-(2-((2-(bis(2- | C12-200/DSPC/ |
| | hydroxydodecyl)amino)ethyl)(2- | Cholesterol/ |
| | hydroxydodecyl)amino)ethyl)piperazin- | PEG-DMG |
| | 1-yl)ethylazanediyl)didodecan-2-ol | 50/10/38.5/1.5 |
| | (C12-200) | Lipid:siRNA 10:1 |
| LNP13 | XTC | XTC/DSPC/Chol/ |
| | | PEG-DMG |
| | | 50/10/38.5/1.5 |
| | | Lipid:siRNA: 33:1 |
| LNP14 | MC3 | MC3/DSPC/Chol/ |
| | | PEG-DMG |
| | | 40/15/40/5 |
| | | Lipid:siRNA: 11:1 |
| LNP15 | MC3 | MC3/DSPC/Chol/ |
| | | PEG-DSG/GalNAc- |
| | | PEG-DSG |
| | | 50/10/35/4.5/0.5 |
| | | Lipid:siRNA: 11:1 |
| LNP16 | MC3 | MC3/DSPC/Chol/ |
| | | PEG-DMG |
| | | 50/10/38.5/1.5 |
| | | Lipid:siRNA: 7:1 |
| LNP17 | MC3 | MC3/DSPC/Chol/ |
| | | PEG-DSG |
| | | 50/10/38.5/1.5 |
| | | Lipid:siRNA: 10:1 |
| LNP18 | MC3 | MC3/DSPC/Chol/ |
| | | PEG-DMG |
| | | 50/10/38.5/1.5 |
| | | Lipid:siRNA: 12:1 |
| LNP19 | MC3 | MC3/DSPC/Chol/ |
| | | PEG-DMG |
| | | 50/10/35/5 |
| | | Lipid:siRNA: 8:1 |
| LNP20 | MC3 | MC3/DSPC/Chol/ |
| | | PEG-DPG |
| | | 50/10/38.5/1.5 |
| | | Lipid:siRNA: 10:1 |
| LNP21 | C12-200 | C12-200/ |
| | | DSPC/Chol/ |
| | | PEG-DSG |
| | | 50/10/38.5/1.5 |
| | | Lipid:siRNA: 7:1 |
| LNP22 | XTC | XTC/DSPC/Chol/ |
| | | PEG-DSG |
| | | 50/10/38.5/1.5 |
| | | Lipid:siRNA: 10:1 |

| | |
|---|---|
| DSPC: | distearoylphosphatidylcholine |
| DPPC: | dipalmitoylphosphatidylcholine |
| PEG- | PEG-didimyristoyl glycerol (C14-PEG, or PEG-C14) |
| DMG: | (PEG with avg mol wt of 2000) |
| PEG-DSG: | PEG-distyryl glycerol (C18-PEG, or PEG-C18) |
| | (PEG with avg mol wt of 2000) |
| PEG- | PEG-carbamoyl-l,2-dimyristyloxypropylamine |
| cDMA: | (PEG with avg mol wt of 2000) |

[0436] SNALP (1,2-Dilinolenyloxy-N,N-dimethylaminopropane (DLinDMA)) comprising formulations are described in International Publication No. WO2009/127060, filed Apr. 15, 2009, which is hereby incorporated by reference.

[0437] XTC comprising formulations are described, e.g., in U.S. Provisional Ser. No. 61/148,366, filed Jan. 29, 2009; U.S. Provisional Ser. No. 61/156,851, filed Mar. 2, 2009; U.S. Provisional Ser. No. 61/185,712, filed Jun. 10, 2009; U.S. Provisional Ser. No. 61/228,373, filed Jul. 24, 2009; U.S. Provisional Ser. No. 61/239,686, filed Sep. 3, 2009, and International Application No. PCT/US2010/022614, filed Jan. 29, 2010, which are hereby incorporated by reference.

[0438] MC3 comprising formulations are described, e.g., in U.S. Provisional Ser. No. 61/244,834, filed Sep. 22, 2009, U.S. Provisional Ser. No. 61/185,800, filed Jun. 10, 2009, and International Application No. PCT/US10/28224, filed Jun. 10, 2010, which are hereby incorporated by reference.

[0439] ALNY-100 comprising formulations are described, e.g., International patent application number PCT/US09/63933, filed on Nov. 10, 2009, which is hereby incorporated by reference.

[0440] C12-200 comprising formulations are described in U.S. Provisional Ser. No. 61/175,770, filed May 5, 2009 and International Application No. PCT/US10/33777, filed May 5, 2010, which are hereby incorporated by reference.

### Synthesis of Cationic Lipids

[0441] Any of the compounds, e.g., cationic lipids and the like, used in the nucleic acid-lipid particles featured in the disclosure may be prepared by known organic synthesis techniques. All substituents are as defined below unless indicated otherwise.

[0442] “Alkyl” means a straight chain or branched, noncyclic or cyclic, saturated aliphatic hydrocarbon containing from 1 to 24 carbon atoms. Representative saturated straight chain alkyls include methyl, ethyl, n-propyl, n-butyl, n-pentyl, n-hexyl, and the like; while saturated branched alkyls include isopropyl, sec-butyl, isobutyl, tert-butyl, isopentyl, and the like. Representative saturated cyclic alkyls include cyclopropyl, cyclobutyl, cyclopentyl, cyclohexyl, and the like; while unsaturated cyclic alkyls include cyclopentenyl and cyclohexenyl, and the like.

[0443] “Alkenyl” means an alkyl, as defined above, containing at least one double bond between adjacent carbon atoms. Alkenyls include both cis and trans isomers. Representative straight chain and branched alkenyls include ethylenyl, propylenyl, 1-butenyl, 2-butenyl, isobutylenyl, 1-pentenyl, 2-pentenyl, 3-methyl-1-butenyl, 2-methyl-2-butenyl, 2,3-dimethyl-2-butenyl, and the like.

[0444] “Alkynyl” means any alkyl or alkenyl, as defined above, which additionally contains at least one triple bond between adjacent carbons. Representative straight chain and branched alkynyls include acetylenyl, propynyl, 1-butynyl, 2-butynyl, 1-pentynyl, 2-pentynyl, 3-methyl-1 butynyl, and the like.

[0445] “Acyl” means any alkyl, alkenyl, or alkynyl wherein the carbon at the point of attachment is substituted with an oxo group, as defined below. For example, —C(═O)alkyl, —C(═O)alkenyl, and —C(═O)alkynyl are acyl groups.

[0446] “Heterocycle” means a 5- to 7-membered monocyclic, or 7- to 10-membered bicyclic, heterocyclic ring which is either saturated, unsaturated, or aromatic, and which contains from 1 or 2 heteroatoms independently selected from nitrogen, oxygen and sulfur, and wherein the nitrogen and sulfur heteroatoms may be optionally oxidized, and the nitrogen heteroatom may be optionally quaternized, including bicyclic rings in which any of the above heterocycles are fused to a benzene ring. The heterocycle may be attached via any heteroatom or carbon atom. Heterocycles include heteroaryls as defined below. Heterocycles include morpholinyl, pyrrolidinonyl, pyrrolidinyl, piperidinyl, piperizynyl, hydantoinyl, valerolactamyl, oxiranyl, oxetanyl, tetrahydrofuranyl, tetrahydropyranyl, tetrahydropyridinyl, tetrahydroprimidinyl, tetrahydrothiophenyl, tetrahydrothiopyranyl, tetrahydropyrimidinyl, tetrahydrothiophenyl, tetrahydrothiopyranyl, and the like.

[0447] The terms “optionally substituted alkyl”, “optionally substituted alkenyl”, “optionally substituted alkynyl”, “optionally substituted acyl”, and “optionally substituted heterocycle” means that, when substituted, at least one hydrogen atom is replaced with a substituent. In the case of an oxo substituent (=O) two hydrogen atoms are replaced. In this regard, substituents include oxo, halogen, heterocycle, —CN, —OR^{x}, —NR^{x}R^{y}, —NR^{x}C(═O)R^{y}, —NR^{x}SO₂R^{y}, —C(═O)R^{x}, —C(═O)OR^{x}, —C(═O)NR^{x}R^{y}, —SOₙR^{x} and —SOₙNR^{x}R^{y}, wherein n is 0, 1 or 2, R^{x} and R^{y} are the same or different and independently hydrogen, alkyl or heterocycle, and each of said alkyl and heterocycle substituents may be further substituted with one or more of oxo, halogen, —OH, —CN, alkyl, —OR^{x}, heterocycle, —NR^{x}R^{y}, —NR^{x}C(═O)R^{y}, —NR^{x}SO₂R^{y}, —C(═O)R^{x}, —C(═O)OR^{x}, —C(═O)NR^{x}R^{y}, —SOₙR^{x} and —SOₙNR^{x}R^{y}.

[0448] “Halogen” means fluoro, chloro, bromo and iodo.

[0449] In some embodiments, the methods featured in the disclosure may require the use of protecting groups. Protecting group methodology is well known to those skilled in the art (see, for example, PROTECTIVE GROUPS IN ORGANIC SYNTHESIS, Green, T. W. et al., Wiley-Interscience, New York City, 1999). Briefly, protecting groups within the context of this disclosure are any group that reduces or eliminates unwanted reactivity of a functional group. A protecting group can be added to a functional group to mask its reactivity during certain reactions and then removed to reveal the original functional group. In some embodiments an “alcohol protecting group” is used. An “alcohol protecting group” is any group which decreases or eliminates unwanted reactivity of an alcohol functional group. Protecting groups can be added and removed using techniques well known in the art.

### Synthesis of Formula A

[0450] In one embodiments, nucleic acid-lipid particles featured in the disclosure are formulated using a cationic lipid of formula A:

[chemical structure]

where R1 and R2 are independently alkyl, alkenyl or alkynyl, each can be optionally substituted, and R3 and R4 are independently lower alkyl or R3 and R4 can be taken together to form an optionally substituted heterocyclic ring. In some embodiments, the cationic lipid is XTC (2,2-Dilinoleyl-4-dimethylaminoethyl-[1,3]-dioxolane). In general, the lipid of formula A above may be made by the following Reaction Schemes 1 or 2, wherein all substituents are as defined above unless indicated otherwise.

[chemical structure]

[0451] Lipid A, where R₁ and R₂ are independently alkyl, alkenyl or alkynyl, each can be optionally substituted, and R₃ and R₄ are independently lower alkyl or R₃ and R₄ can be taken together to form an optionally substituted heterocyclic ring, can be prepared according to Scheme 1. Ketone 1 and bromide 2 can be purchased or prepared according to methods known to those of ordinary skill in the art. Reaction of 1 and 2 yields ketal 3. Treatment of ketal 3 with amine 4 yields lipids of formula A. The lipids of formula A can be converted to the corresponding ammonium salt with an organic salt of formula 5, where X is anion counter ion selected from halogen, hydroxide, phosphate, sulfate, or the like.

[chemical structure]

[0452] Alternatively, the ketone 1 starting material can be prepared according to Scheme 2. Grignard reagent 6 and cyanide 7 can be purchased or prepared according to methods known to those of ordinary skill in the art. Reaction of 6 and 7 yields ketone 1. Conversion of ketone 1 to the corresponding lipids of formula A is as described in Scheme 1.

### Synthesis of MC3

[0453] Preparation of DLin-M-C3-DMA (i.e., (6Z,9Z,28Z,31Z)-heptatriaconta-6,9,28,31-tetraen-19-yl 4-(dimethylamino)butanoate) was as follows. A solution of (6Z,9Z,28Z,31Z)-heptatriaconta-6,9,28,31-tetraen-19-ol (0.53 g), 4-N,N-dimethylaminobutyric acid hydrochloride (0.51 g), 4-N,N-dimethylaminopyridine (0.61 g) and 1-ethyl-3-(3-dimethylaminopropyl)carbodiimide hydrochloride (0.53 g) in dichloromethane (5 mL) was stirred at room temperature overnight. The solution was washed with dilute hydrochloric acid followed by dilute aqueous sodium bicarbonate. The organic fractions were dried over anhydrous magnesium sulphate, filtered and the solvent removed on a rotovap. The residue was passed down a silica gel column (20 g) using a 1-5% methanol/dichloromethane elution gradient. Fractions containing the purified product were combined and the solvent removed, yielding a colorless oil (0.54 g).

### Synthesis of ALNY-100

[0454] Synthesis of ketal 519 [ALNY-100] was performed using the following scheme 3:

[chemical structure]

### Synthesis of 515

[0455] To a stirred suspension of LiAlH4 (3.74 g, 0.09852 mol) in 200 ml anhydrous THF in a two neck RBF (1 L), was added a solution of 514 (10 g, 0.04926 mol) in 70 mL of THF slowly at 0° C. under nitrogen atmosphere. After complete addition, reaction mixture was warmed to room temperature and then heated to reflux for 4 h. Progress of the reaction was monitored by TLC. After completion of reaction (by TLC) the mixture was cooled to 0° C. and quenched with careful addition of saturated Na2SO4 solution. Reaction mixture was stirred for 4 h at room 10 temperature and filtered off. Residue was washed well with THF. The filtrate and washings were mixed and diluted with 400 mL dioxane and 26 mL conc. HCl and stirred for 20 minutes at room temperature. The volatilities were stripped off under vacuum to furnish the hydrochloride salt of 515 as a white solid. Yield: 7.12 g 1H-NMR (DMSO, 400 MHz): δ=9.34 (broad, 2H), 5.68 (s, 2H), 3.74 (m, 1H), 2.66-2.60 (m, 2H), 2.50-2.45 (m, 5H).

### Synthesis of 516

[0456] To a stirred solution of compound 515 in 100 mL dry DCM in a 250 mL two neck RBF, was added NEt3 (37.2 mL, 0.2669 mol) and cooled to 0° C. under nitrogen atmosphere. After a slow addition of N-(benzyloxy-carbonyloxy)-succinimide (20 g, 0.08007 mol) in 50 mL dry DCM, reaction mixture was allowed to warm to room temperature. After completion of the reaction (2-3 h by TLC) mixture was washed successively with 1N HCl solution (1×100 mL) and saturated NaHCO₃ solution (1×50 mL). The organic layer was then dried over anhyd. Na2SO4 and the solvent was evaporated to give crude material which was purified by silica gel column chromatography to get 516 as sticky mass. Yield: 11 g (89%). 1H-NMR (CDCl3, 400 MHz): δ=7.36-7.27 (m, 5H), 5.69 (s, 2H), 5.12 (s, 2H), 4.96 (br., 1H) 2.74 (s, 3H), 2.60 (m, 2H), 2.30-2.25 (m, 2H). LC-MS [M+H] −232.3 (96.94%).

### Synthesis of 517A and 517B

[0457] The cyclopentene 516 (5 g, 0.02164 mol) was dissolved in a solution of 220 mL acetone and water (10:1) in a single neck 500 mL RBF and to it was added N-methyl morpholine-N-oxide (7.6 g, 0.06492 mol) followed by 4.2 mL of 7.6% solution of OsO4 (0.275 g, 0.00108 mol) in tert-butanol at room temperature. After completion of the reaction (~3 h), the mixture was quenched with addition of solid Na2SO3 and resulting mixture was stirred for 1.5 h at room temperature. Reaction mixture was diluted with DCM (300 mL) and washed with water (2×100 mL) followed by saturated NaHCO3 (1×50 mL) solution, water (1×30 mL) and finally with brine (1×50 mL). Organic phase was dried over an.Na2SO4 and solvent was removed in vacuum. Silica gel column chromatographic purification of the crude material was afforded a mixture of diastereomers, which were separated by prep HPLC. Yield: −6 g crude

[0458] 517A—Peak-1 (white solid), 5.13 g (96%). 1H-NMR (DMSO, 400 MHz): δ=7.39-7.31 (m, 5H), 5.04 (s, 2H), 4.78-4.73 (m, 1H), 4.48-4.47 (d, 2H), 3.94-3.93 (m, 2H), 2.71 (s, 3H), 1.72-1.67 (m, 4H). LC-MS—[M+H]−266.3, [M+NH4+]−283.5 present, HPLC-97.86%. Stereochemistry confirmed by X-ray.

### Synthesis of 518

[0459] Using a procedure analogous to that described for the synthesis of compound 505, compound 518 (1.2 g, 41%) was obtained as a colorless oil. 1H-NMR (CDCl3, 400 MHz): δ=7.35-7.33 (m, 4H), 7.30-7.27 (m, 1H), 5.37-5.27 (m, 8H), 5.12 (s, 2H), 4.75 (m, 1H), 4.58-4.57 (m, 2H), 2.78-2.74 (m, 7H), 2.06-2.00 (m, 8H), 1.96-1.91 (m, 2H), 1.62 (m, 4H), 1.48 (m, 2H), 1.37-1.25 (br m, 36H), 0.87 (m, 6H). HPLC-98.65%.

### General Procedure for the Synthesis of Compound 519

[0460] A solution of compound 518 (1 eq) in hexane (15 mL) was added in a drop-wise fashion to an ice-cold solution of LAH in THF (1 M, 2 eq). After complete addition, the mixture was heated at 40° C. over 0.5 h then cooled again on an ice bath. The mixture was carefully hydrolyzed with saturated aqueous Na2SO4 then filtered through celite and reduced to an oil. Column chromatography provided the pure 519 (1.3 g, 68%) which was obtained as a colorless oil. 13C NMR=130.2, 130.1 (x2), 127.9 (x3), 112.3, 79.3, 64.4, 44.7, 38.3, 35.4, 31.5, 29.9 (x2), 29.7, 29.6 (x2), 29.5 (x3), 29.3 (x2), 27.2 (x3), 25.6, 24.5, 23.3, 226, 14.1; Electrospray MS (+ve): Molecular weight for C44H80NO2 (M+H)+ Calc. 654.6, Found 654.6.

[0461] Formulations prepared by either the standard or extrusion-free method can be characterized in similar manners. For example, formulations are typically characterized by visual inspection. They should be whitish translucent solutions free from aggregates or sediment. Particle size and particle size distribution of lipid-nanoparticles can be measured by light scattering using, for example, a Malvern Zetasizer Nano ZS (Malvern, USA). Particles should be about 20-300 nm, such as 40-100 nm in size. The particle size distribution should be unimodal. The total dsRNA concentration in the formulation, as well as the entrapped fraction, is estimated using a dye exclusion assay. A sample of the formulated dsRNA can be incubated with an RNA-binding dye, such as Ribogreen (Molecular Probes) in the presence or absence of a formulation disrupting surfactant, e.g., 0.5% Triton-X100. The total dsRNA in the formulation can be determined by the signal from the sample containing the surfactant, relative to a standard curve. The entrapped fraction is determined by subtracting the “free” dsRNA content (as measured by the signal in the absence of surfactant) from the total dsRNA content. Percent entrapped dsRNA is typically >85%. For SNALP formulation, the particle size is at least 30 nm, at least 40 nm, at least 50 nm, at least 60 nm, at least 70 nm, at least 80 nm, at least 90 nm, at least 100 nm, at least 110 nm, and at least 120 nm. The suitable range is typically about at least 50 nm to about at least 110 nm, about at least 60 nm to about at least 100 nm, or about at least 80 nm to about at least 90 nm.

[0462] Compositions and formulations for oral administration include powders or granules, microparticulates, nanoparticulates, suspensions or solutions in water or non-aqueous media, capsules, gel capsules, sachets, tablets or minitablets. Thickeners, flavoring agents, diluents, emulsifiers, dispersing aids or binders may be desirable. In some embodiments, oral formulations are those in which dsRNAs featured in the disclosure are administered in conjunction with one or more penetration enhancers surfactants and chelators. Suitable surfactants include fatty acids and/or esters or salts thereof, bile acids and/or salts thereof. Suitable bile acids/salts include chenodeoxycholic acid (CDCA) and ursodeoxychenodeoxycholic acid (UDCA), cholic acid, dehydrocholic acid, deoxycholic acid, glucholic acid, glycholic acid, glycodeoxycholic acid, taurocholic acid, taurodeoxycholic acid, sodium tauro-24,25-dihydro-fusidate and sodium glycodihydrofusidate. Suitable fatty acids include arachidonic acid, undecanoic acid, oleic acid, lauric acid, caprylic acid, capric acid, myristic acid, palmitic acid, stearic acid, linoleic acid, linolenic acid, dicaprate, tricaprate, monoolein, dilaurin, glyceryl 1-monocaprate, 1-dodecylazacycloheptan-2-one, an acylcarnitine, an acylcholine, or a monoglyceride, a diglyceride or a pharmaceutically acceptable salt thereof (e.g., sodium). In some embodiments, combinations of penetration enhancers are used, for example, fatty acids/salts in combination with bile acids/salts. One exemplary combination is the sodium salt of lauric acid, capric acid and UDCA. Further penetration enhancers include polyoxyethylene-9-lauryl ether, polyoxyethylene-20-cetyl ether. DsRNAs featured in the disclosure may be delivered orally, in granular form including sprayed dried particles, or complexed to form micro or nanoparticles. DsRNA complexing agents include poly-amino acids; polyimines; polyacrylates; polyalkylacrylates, polyoxethanes, polyalkylcyanoacrylates; cationized gelatins, albumins, starches, acrylates, polyethyleneglycols (PEG) and starches; polyalkylcyanoacrylates; DEAE-derivatized polyimines, pollulans, celluloses and starches. Suitable complexing agents include chitosan, N-trimethylchitosan, poly-L-lysine, polyhistidine, polyornithine, polyspermines, protamine, polyvinylpyridine, polythiodiethylaminomethylethylene P(TDAE), polyaminostyrene (e.g., β-amino), poly(methylcyanoacrylate), poly(ethylcyanoacrylate), poly(butylcyanoacrylate), poly(isobutylcyanoacrylate), poly(isohexylcynaoacrylate), DEAE-methacrylate, DEAE-hexylacrylate, DEAE-acrylamide, DEAE-albumin and DEAE-dextran, polymethylacrylate, polyhexylacrylate, poly(D,L-lactic acid), poly(DL-lactic-co-glycolic acid (PLGA), alginate, and polyethyleneglycol (PEG). Oral formulations for dsRNAs and their preparation are described in detail in U.S. Pat. No. 6,887,906, US Publn. No. 20030027780, and U.S. Pat. No. 6,747,014, each of which is incorporated herein by reference.

[0463] Compositions and formulations for parenteral, intraparenchymal (into the brain), intrathecal, intraventricular or intrahepatic administration may include sterile aqueous solutions which may also contain buffers, diluents and other suitable additives such as, but not limited to, penetration enhancers, carrier compounds and other pharmaceutically acceptable carriers or excipients.

[0464] Pharmaceutical compositions of the present disclosure include, but are not limited to, solutions, emulsions, and liposome-containing formulations. These compositions may be generated from a variety of components that include, but are not limited to, preformed liquids, self-emulsifying solids and self-emulsifying semisolids.

[0465] The pharmaceutical formulations featured in the present disclosure, which may conveniently be presented in unit dosage form, may be prepared according to conventional techniques well known in the pharmaceutical industry. Such techniques include the step of bringing into association the active ingredients with the pharmaceutical carrier(s) or excipient(s). In general, the formulations are prepared by uniformly and intimately bringing into association the active ingredients with liquid carriers or finely divided solid carriers or both, and then, if necessary, shaping the product.

[0466] The compositions featured in the present disclosure may be formulated into any of many possible dosage forms such as, but not limited to, tablets, capsules, gel capsules, liquid syrups, soft gels, suppositories, and enemas. The compositions may also be formulated as suspensions in aqueous, non-aqueous or mixed media. Aqueous suspensions may further contain substances which increase the viscosity of the suspension including, for example, sodium carboxymethylcellulose, sorbitol and/or dextran. The suspension may also contain stabilizers.

### Additional Formulations

### Emulsions

[0467] The compositions of the present disclosure may be prepared and formulated as emulsions. Emulsions are typically heterogeneous systems of one liquid dispersed in another in the form of droplets usually exceeding 0.1 m in diameter (see e.g., Ansel's Pharmaceutical Dosage Forms and Drug Delivery Systems, Allen, LV., Popovich N G., and Ansel H C., 2004, Lippincott Williams & Wilkins (8th ed.), New York, NY; Idson, in Pharmaceutical Dosage Forms, Lieberman, Rieger and Banker (Eds.), 1988, Marcel Dekker, Inc., New York, N.Y., volume 1, p. 199; Rosoff, in Pharmaceutical Dosage Forms, Lieberman, Rieger and Banker (Eds.), 1988, Marcel Dekker, Inc., New York, N.Y., Volume 1, p. 245; Block in Pharmaceutical Dosage Forms, Lieberman, Rieger and Banker (Eds.), 1988, Marcel Dekker, Inc., New York, N.Y., volume 2, p. 335; Higuchi et al., in Remington's Pharmaceutical Sciences, Mack Publishing Co., Easton, Pa., 1985, p. 301). Emulsions are often biphasic systems comprising two immiscible liquid phases intimately mixed and dispersed with each other. In general, emulsions may be of either the water-in-oil (w/o) or the oil-in-water (o/w) variety. When an aqueous phase is finely divided into and dispersed as minute droplets into a bulk oily phase, the resulting composition is called a water-in-oil (w/o) emulsion. Alternatively, when an oily phase is finely divided into and dispersed as minute droplets into a bulk aqueous phase, the resulting composition is called an oil-in-water (o/w) emulsion. Emulsions may contain additional components in addition to the dispersed phases, and the active drug which may be present as a solution in either the aqueous phase, oily phase or itself as a separate phase. Pharmaceutical excipients such as emulsifiers, stabilizers, dyes, and anti-oxidants may also be present in emulsions as needed. Pharmaceutical emulsions may also be multiple emulsions that are comprised of more than two phases such as, for example, in the case of oil-in-water-in-oil (o/w/o) and water-in-oil-in-water (w/o/w) emulsions. Such complex formulations often provide certain advantages that simple binary emulsions do not. Multiple emulsions in which individual oil droplets of an o/w emulsion enclose small water droplets constitute a w/o/w emulsion. Likewise a system of oil droplets enclosed in globules of water stabilized in an oily continuous phase provides an o/w/o emulsion.

[0468] Emulsions are characterized by little or no thermodynamic stability. Often, the dispersed or discontinuous phase of the emulsion is well dispersed into the external or continuous phase and maintained in this form through the means of emulsifiers or the viscosity of the formulation. Either of the phases of the emulsion may be a semisolid or a solid, as is the case of emulsion-style ointment bases and creams. Other means of stabilizing emulsions entail the use of emulsifiers that may be incorporated into either phase of the emulsion. Emulsifiers may broadly be classified into four categories: synthetic surfactants, naturally occurring emulsifiers, absorption bases, and finely dispersed solids (see e.g., Ansel's Pharmaceutical Dosage Forms and Drug Delivery Systems, Allen, LV., Popovich N G., and Ansel H C., 2004, Lippincott Williams & Wilkins (8th ed.), New York, NY; Idson, in Pharmaceutical Dosage Forms, Lieberman, Rieger and Banker (Eds.), 1988, Marcel Dekker, Inc., New York, N.Y., volume 1, p. 199).

[0469] Synthetic surfactants, also known as surface active agents, have found wide applicability in the formulation of emulsions and have been reviewed in the literature (see e.g., Ansel's Pharmaceutical Dosage Forms and Drug Delivery Systems, Allen, LV., Popovich N G., and Ansel H C., 2004, Lippincott Williams & Wilkins (8th ed.), New York, NY; Rieger, in Pharmaceutical Dosage Forms, Lieberman, Rieger and Banker (Eds.), 1988, Marcel Dekker, Inc., New York, N.Y., volume 1, p. 285; Idson, in Pharmaceutical Dosage Forms, Lieberman, Rieger and Banker (Eds.), Marcel Dekker, Inc., New York, N.Y., 1988, volume 1, p. 199). Surfactants are typically amphiphilic and comprise a hydrophilic and a hydrophobic portion. The ratio of the hydrophilic to the hydrophobic nature of the surfactant has been termed the hydrophile/lipophile balance (HLB) and is a valuable tool in categorizing and selecting surfactants in the preparation of formulations. Surfactants may be classified into different classes based on the nature of the hydrophilic group: nonionic, anionic, cationic and amphoteric (see e.g., Ansel's Pharmaceutical Dosage Forms and Drug Delivery Systems, Allen, LV., Popovich N G., and Ansel H C., 2004, Lippincott Williams & Wilkins (8th ed.), New York, NY Rieger, in Pharmaceutical Dosage Forms, Lieberman, Rieger and Banker (Eds.), 1988, Marcel Dekker, Inc., New York, N.Y., volume 1, p. 285).

[0470] Naturally occurring emulsifiers used in emulsion formulations include lanolin, beeswax, phosphatides, lecithin and acacia. Absorption bases possess hydrophilic properties such that they can soak up water to form w/o emulsions yet retain their semisolid consistencies, such as anhydrous lanolin and hydrophilic petrolatum. Finely divided solids have also been used as good emulsifiers especially in combination with surfactants and in viscous preparations. These include polar inorganic solids, such as heavy metal hydroxides, nonswelling clays such as bentonite, attapulgite, hectorite, kaolin, montmorillonite, colloidal aluminum silicate and colloidal magnesium aluminum silicate, pigments and nonpolar solids such as carbon or glyceryl tristearate.

[0471] A large variety of non-emulsifying materials are also included in emulsion formulations and contribute to the properties of emulsions. These include fats, oils, waxes, fatty acids, fatty alcohols, fatty esters, humectants, hydrophilic colloids, preservatives and antioxidants (Block, in Pharmaceutical Dosage Forms, Lieberman, Rieger and Banker (Eds.), 1988, Marcel Dekker, Inc., New York, N.Y., volume 1, p. 335; Idson, in Pharmaceutical Dosage Forms, Lieberman, Rieger and Banker (Eds.), 1988, Marcel Dekker, Inc., New York, N.Y., volume 1, p. 199).

[0472] Hydrophilic colloids or hydrocolloids include naturally occurring gums and synthetic polymers such as polysaccharides (for example, acacia, agar, alginic acid, carrageenan, guar gum, karaya gum, and tragacanth), cellulose derivatives (for example, carboxymethylcellulose and carboxypropylcellulose), and synthetic polymers (for example, carbomers, cellulose ethers, and carboxyvinyl polymers). These disperse or swell in water to form colloidal solutions that stabilize emulsions by forming strong interfacial films around the dispersed-phase droplets and by increasing the viscosity of the external phase.

[0473] Since emulsions often contain a number of ingredients such as carbohydrates, proteins, sterols and phosphatides that may readily support the growth of microbes, these formulations often incorporate preservatives. Commonly used preservatives included in emulsion formulations include methyl paraben, propyl paraben, quaternary ammonium salts, benzalkonium chloride, esters of p-hydroxybenzoic acid, and boric acid. Antioxidants are also commonly added to emulsion formulations to prevent deterioration of the formulation. Antioxidants used may be free radical scavengers such as tocopherols, alkyl gallates, butylated hydroxyanisole, butylated hydroxytoluene, or reducing agents such as ascorbic acid and sodium metabisulfite, and antioxidant synergists such as citric acid, tartaric acid, and lecithin.

[0474] The application of emulsion formulations via dermatological, oral and parenteral routes and methods for their manufacture have been reviewed in the literature (see e.g., Ansel's Pharmaceutical Dosage Forms and Drug Delivery Systems, Allen, LV., Popovich N G., and Ansel H C., 2004, Lippincott Williams & Wilkins (8th ed.), New York, NY; Idson, in Pharmaceutical Dosage Forms, Lieberman, Rieger and Banker (Eds.), 1988, Marcel Dekker, Inc., New York, N.Y., volume 1, p. 199). Emulsion formulations for oral delivery have been very widely used because of ease of formulation, as well as efficacy from an absorption and bioavailability standpoint (see e.g., Ansel's Pharmaceutical Dosage Forms and Drug Delivery Systems, Allen, LV., Popovich N G., and Ansel H C., 2004, Lippincott Williams & Wilkins (8th ed.), New York, NY; Rosoff, in Pharmaceutical Dosage Forms, Lieberman, Rieger and Banker (Eds.), 1988, Marcel Dekker, Inc., New York, N.Y., volume 1, p. 245; Idson, in Pharmaceutical Dosage Forms, Lieberman, Rieger and Banker (Eds.), 1988, Marcel Dekker, Inc., New York, N.Y., volume 1, p. 199). Mineral-oil base laxatives, oil-soluble vitamins and high fat nutritive preparations are among the materials that have commonly been administered orally as o/w emulsions.

[0475] In one embodiment of the present disclosure, the compositions of iRNAs and nucleic acids are formulated as microemulsions. A microemulsion may be defined as a system of water, oil and amphiphile which is a single optically isotropic and thermodynamically stable liquid solution (see e.g., Ansel's Pharmaceutical Dosage Forms and Drug Delivery Systems, Allen, LV., Popovich N G., and Ansel H C., 2004, Lippincott Williams & Wilkins (8th ed.), New York, NY; Rosoff, in Pharmaceutical Dosage Forms, Lieberman, Rieger and Banker (Eds.), 1988, Marcel Dekker, Inc., New York, N.Y., volume 1, p. 245). Typically microemulsions are systems that are prepared by first dispersing an oil in an aqueous surfactant solution and then adding a sufficient amount of a fourth component, generally an intermediate chain-length alcohol to form a transparent system. Therefore, microemulsions have also been described as thermodynamically stable, isotopically clear dispersions of two immiscible liquids that are stabilized by interfacial films of surface-active molecules (Leung and Shah, in: Controlled Release of Drugs: Polymers and Aggregate Systems, Rosoff, M., Ed., 1989, VCH Publishers, New York, pages 185-215). Microemulsions commonly are prepared via a combination of three to five components that include oil, water, surfactant, cosurfactant and electrolyte. Whether the microemulsion is of the water-in-oil (w/o) or an oil-in-water (o/w) type is dependent on the properties of the oil and surfactant used and on the structure and geometric packing of the polar heads and hydrocarbon tails of the surfactant molecules (Schott, in Remington's Pharmaceutical Sciences, Mack Publishing Co., Easton, Pa., 1985, p. 271).

[0476] The phenomenological approach utilizing phase diagrams has been extensively studied and has yielded a comprehensive knowledge, to one skilled in the art, of how to formulate microemulsions (see e.g., Ansel's Pharmaceutical Dosage Forms and Drug Delivery Systems, Allen, LV., Popovich N G., and Ansel H C., 2004, Lippincott Williams & Wilkins (8th ed.), New York, NY; Rosoff, in Pharmaceutical Dosage Forms, Lieberman, Rieger and Banker (Eds.), 1988, Marcel Dekker, Inc., New York, N.Y., volume 1, p. 245; Block, in Pharmaceutical Dosage Forms, Lieberman, Rieger and Banker (Eds.), 1988, Marcel Dekker, Inc., New York, N.Y., volume 1, p. 335). Compared to conventional emulsions, microemulsions offer the advantage of solubilizing water-insoluble drugs in a formulation of thermodynamically stable droplets that are formed spontaneously.

[0477] Surfactants used in the preparation of microemulsions include, but are not limited to, ionic surfactants, non-ionic surfactants, Brij 96, polyoxyethylene oleyl ethers, polyglycerol fatty acid esters, tetraglycerol monolaurate (ML310), tetraglycerol monooleate (MO310), hexaglycerol monooleate (PO310), hexaglycerol pentaoleate (PO500), decaglycerol monocaprate (MCA750), decaglycerol monooleate (MO750), decaglycerol sequioleate (SO750), decaglycerol decaoleate (DAO750), alone or in combination with cosurfactants. The cosurfactant, usually a short-chain alcohol such as ethanol, 1-propanol, and 1-butanol, serves to increase the interfacial fluidity by penetrating into the surfactant film and consequently creating a disordered film because of the void space generated among surfactant molecules. Microemulsions may, however, be prepared without the use of cosurfactants and alcohol-free self-emulsifying microemulsion systems are known in the art. The aqueous phase may typically be, but is not limited to, water, an aqueous solution of the drug, glycerol, PEG300, PEG400, polyglycerols, propylene glycols, and derivatives of ethylene glycol. The oil phase may include, but is not limited to, materials such as Captex 300, Captex 355, Capmul M C M, fatty acid esters, medium chain (C8-C12) mono, di, and tri-glycerides, polyoxyethylated glyceryl fatty acid esters, fatty alcohols, polyglycolized glycerides, saturated polyglycolized C8-C10 glycerides, vegetable oils and silicone oil.

[0478] Microemulsions are particularly of interest from the standpoint of drug solubilization and the enhanced absorption of drugs. Lipid based microemulsions (both o/w and w/o) have been proposed to enhance the oral bioavailability of drugs, including peptides (see e.g., U.S. Pat. Nos. 6,191,105; 7,063,860; 7,070,802; 7,157,099; Constantinides et al., Pharmaceutical Research, 1994, 11, 1385-1390; Ritschel, Meth. Find. Exp. Clin. Pharmacol., 1993, 13, 205). Microemulsions afford advantages of improved drug solubilization, protection of drug from enzymatic hydrolysis, possible enhancement of drug absorption due to surfactant-induced alterations in membrane fluidity and permeability, ease of preparation, ease of oral administration over solid dosage forms, improved clinical potency, and decreased toxicity (see e.g., U.S. Pat. Nos. 6,191,105; 7,063,860; 7,070,802; 7,157,099; Constantinides et al., Pharmaceutical Research, 1994, 11, 1385; Ho et al., J. Pharm. Sci., 1996, 85, 138-143). Often microemulsions may form spontaneously when their components are brought together at ambient temperature. This may be particularly advantageous when formulating thermolabile drugs, peptides or iRNAs. Microemulsions have also been effective in the transdermal delivery of active components in both cosmetic and pharmaceutical applications. It is expected that the microemulsion compositions and formulations of the present disclosure will facilitate the increased systemic absorption of iRNAs and nucleic acids from the gastrointestinal tract, as well as improve the local cellular uptake of iRNAs and nucleic acids.

[0479] Microemulsions of the present disclosure may also contain additional components and additives such as sorbitan monostearate (Grill 3), Labrasol, and penetration enhancers to improve the properties of the formulation and to enhance the absorption of the iRNAs and nucleic acids of the present disclosure. Penetration enhancers used in the microemulsions of the present disclosure may be classified as belonging to one of five broad categories—surfactants, fatty acids, bile salts, chelating agents, and non-chelating non-surfactants (Lee et al., Critical Reviews in Therapeutic Drug Carrier Systems, 1991, p. 92). Each of these classes has been discussed above.

### Penetration Enhancers

[0480] In one embodiment, the present disclosure employs various penetration enhancers to effect the efficient delivery of nucleic acids, particularly iRNAs, to the skin of animals. Most drugs are present in solution in both ionized and nonionized forms. However, usually only lipid soluble or lipophilic drugs readily cross cell membranes. It has been discovered that even non-lipophilic drugs may cross cell membranes if the membrane to be crossed is treated with a penetration enhancer. In addition to aiding the diffusion of non-lipophilic drugs across cell membranes, penetration enhancers also enhance the permeability of lipophilic drugs.

[0481] Penetration enhancers may be classified as belonging to one of five broad categories, i.e., surfactants, fatty acids, bile salts, chelating agents, and non-chelating non-surfactants (see e.g., Malmsten, M. Surfactants and polymers in drug delivery, Informa Health Care, New York, NY, 2002; Lee et al., Critical Reviews in Therapeutic Drug Carrier Systems, 1991, p. 92). Each of the above mentioned classes of penetration enhancers are described below in greater detail.

[0482] Surfactants: In connection with the present disclosure, surfactants (or “surface-active agents”) are chemical entities which, when dissolved in an aqueous solution, reduce the surface tension of the solution or the interfacial tension between the aqueous solution and another liquid, with the result that absorption of iRNAs through the mucosa is enhanced. In addition to bile salts and fatty acids, these penetration enhancers include, for example, sodium lauryl sulfate, polyoxyethylene-9-lauryl ether and polyoxyethylene-20-cetyl ether) (see e.g., Malmsten, M. Surfactants and polymers in drug delivery, Informa Health Care, New York, NY, 2002; Lee et al., Critical Reviews in Therapeutic Drug Carrier Systems, 1991, p.92); and perfluorochemical emulsions, such as FC-43. Takahashi et al., J. Pharm. Pharmacol., 1988, 40, 252).

[0483] Fatty acids: Various fatty acids and their derivatives which act as penetration enhancers include, for example, oleic acid, lauric acid, capric acid (n-decanoic acid), myristic acid, palmitic acid, stearic acid, linoleic acid, linolenic acid, dicaprate, tricaprate, monoolein (1-monooleoyl-rac-glycerol), dilaurin, caprylic acid, arachidonic acid, glycerol 1-monocaprate, 1-dodecylazacycloheptan-2-one, acylcarnitines, acylcholines, C₁₋₂₀ alkyl esters thereof (e.g., methyl, isopropyl and t-butyl), and mono- and di-glycerides thereof (i.e., oleate, laurate, caprate, myristate, palmitate, stearate, linoleate, etc.) (see e.g., Touitou, E., et al. Enhancement in Drug Delivery, CRC Press, Danvers, MA, 2006; Lee et al., Critical Reviews in Therapeutic Drug Carrier Systems, 1991, p.92; Muranishi, Critical Reviews in Therapeutic Drug Carrier Systems, 1990, 7, 1-33; El Hariri et al., J. Pharm. Pharmacol., 1992, 44, 651-654).

[0484] Bile salts: The physiological role of bile includes the facilitation of dispersion and absorption of lipids and fat-soluble vitamins (see e.g., Malmsten, M. Surfactants and polymers in drug delivery, Informa Health Care, New York, NY, 2002; Brunton, Chapter 38 in: Goodman & Gilman's The Pharmacological Basis of Therapeutics, 9th Ed., Hardman et al. Eds., McGraw-Hill, New York, 1996, pp. 934-935). Various natural bile salts, and their synthetic derivatives, act as penetration enhancers. Thus the term “bile salts” includes any of the naturally occurring components of bile as well as any of their synthetic derivatives. Suitable bile salts include, for example, cholic acid (or its pharmaceutically acceptable sodium salt, sodium cholate), dehydrocholic acid (sodium dehydrocholate), deoxycholic acid (sodium deoxycholate), glucholic acid (sodium glucholate), glycholic acid (sodium glycocholate), glycodeoxycholic acid (sodium glycodeoxycholate), taurocholic acid (sodium taurocholate), taurodeoxycholic acid (sodium taurodeoxycholate), chenodeoxycholic acid (sodium chenodeoxycholate), ursodeoxycholic acid (UDCA), sodium tauro-24,25-dihydro-fusidate (STDHF), sodium glycodihydrofusidate and polyoxyethylene-9-lauryl ether (POE) (see e.g., Malmsten, M. Surfactants and polymers in drug delivery, Informa Health Care, New York, NY, 2002; Lee et al., Critical Reviews in Therapeutic Drug Carrier Systems, 1991, page 92; Swinyard, Chapter 39 In: Remington's Pharmaceutical Sciences, 18th Ed., Gennaro, ed., Mack Publishing Co., Easton, Pa., 1990, pages 782-783; Muranishi, Critical Reviews in Therapeutic Drug Carrier Systems, 1990, 7, 1-33; Yamamoto et al., J. Pharm. Exp. Ther., 1992, 263, 25; Yamashita et al., J. Pharm. Sci., 1990, 79, 579-583).

[0485] Chelating Agents: Chelating agents, as used in connection with the present disclosure, can be defined as compounds that remove metallic ions from solution by forming complexes therewith, with the result that absorption of iRNAs through the mucosa is enhanced. With regards to their use as penetration enhancers in the present disclosure, chelating agents have the added advantage of also serving as DNase inhibitors, as most characterized DNA nucleases require a divalent metal ion for catalysis and are thus inhibited by chelating agents (Jarrett, J. Chromatogr., 1993, 618, 315-339). Suitable chelating agents include but are not limited to disodium ethylenediaminetetraacetate (EDTA), citric acid, salicylates (e.g., sodium salicylate, 5-methoxysalicylate and homovanilate), N-acyl derivatives of collagen, laureth-9 and N-amino acyl derivatives of β-diketones (enamines)(see e.g., Katdare, A. et al., Excipient development for pharmaceutical, biotechnology, and drug delivery, CRC Press, Danvers, MA, 2006; Lee et al., Critical Reviews in Therapeutic Drug Carrier Systems, 1991, page 92; Muranishi, Critical Reviews in Therapeutic Drug Carrier Systems, 1990, 7, 1-33; Buur et al., J. Control Rel., 1990, 14, 43-51).

[0486] Non-chelating non-surfactants: As used herein, non-chelating non-surfactant penetration enhancing compounds can be defined as compounds that demonstrate insignificant activity as chelating agents or as surfactants but that nonetheless enhance absorption of iRNAs through the alimentary mucosa (see e.g., Muranishi, Critical Reviews in Therapeutic Drug Carrier Systems, 1990, 7, 1-33). This class of penetration enhancers include, for example, unsaturated cyclic ureas, 1-alkyl- and 1-alkenylazacyclo-alkanone derivatives (Lee et al., Critical Reviews in Therapeutic Drug Carrier Systems, 1991, page 92); and non-steroidal anti-inflammatory agents such as diclofenac sodium, indomethacin and phenylbutazone (Yamashita et al., J. Pharm. Pharmacol., 1987, 39, 621-626).

[0487] Agents that enhance uptake of iRNAs at the cellular level may also be added to the pharmaceutical and other compositions of the present disclosure. For example, cationic lipids, such as lipofectin (Junichi et al, U.S. Pat. No. 5,705,188), cationic glycerol derivatives, and polycationic molecules, such as polylysine (Lollo et al., PCT Application WO 97/30731), are also known to enhance the cellular uptake of dsRNAs. Examples of commercially available transfection reagents include, for example Lipofectamine™ (Invitrogen; Carlsbad, CA), Lipofectamine 2000™ (Invitrogen; Carlsbad, CA), 293Fectin™ (Invitrogen; Carlsbad, CA), Cellfectin™ (Invitrogen; Carlsbad, CA), DMRIE-C™ (Invitrogen; Carlsbad, CA), FreeStyle™ MAX (Invitrogen; Carlsbad, CA), Lipofectamine™ 2000 CD (Invitrogen; Carlsbad, CA), Lipofectamine™ (Invitrogen; Carlsbad, CA), RNAiMAX (Invitrogen; Carlsbad, CA), Oligofectamine™ (Invitrogen; Carlsbad, CA), Optifect™ (Invitrogen; Carlsbad, CA), X-tremeGENE Q2 Transfection Reagent (Roche; Grenzacherstrasse, Switzerland), DOTAP Liposomal Transfection Reagent (Grenzacherstrasse, Switzerland), DOSPER Liposomal Transfection Reagent (Grenzacherstrasse, Switzerland), or Fugene (Grenzacherstrasse, Switzerland), Transfectam® Reagent (Promega; Madison, WI), TransFast™ Transfection Reagent (Promega; Madison, WI), Tfx™-20 Reagent (Promega; Madison, WI), Tfx™_50 Reagent (Promega; Madison, WI), DreamFect™ (OZ Biosciences; Marseille, France), EcoTransfect (OZ Biosciences; Marseille, France), TransPass^{a} D1 Transfection Reagent (New England Biolabs; Ipswich, MA, USA), LyoVec™/LipoGen™ (Invivogen; San Diego, CA, USA), PerFectin Transfection Reagent (Genlantis; San Diego, CA, USA), NeuroPORTER Transfection Reagent (Genlantis; San Diego, CA, USA), GenePORTER Transfection reagent (Genlantis; San Diego, CA, USA), GenePORTER 2 Transfection reagent (Genlantis; San Diego, CA, USA), Cytofectin Transfection Reagent (Genlantis; San Diego, CA, USA), BaculoPORTER Transfection Reagent (Genlantis; San Diego, CA, USA), TroganPORTER™ transfection Reagent (Genlantis; San Diego, CA, USA), RiboFect (Bioline; Taunton, MA, USA), PlasFect (Bioline; Taunton, MA, USA), UniFECTOR (B-Bridge International; Mountain View, CA, USA), SureFECTOR (B-Bridge International; Mountain View, CA, USA), or HiFect™ (B-Bridge International, Mountain View, CA, USA), among others.

[0488] Other agents may be utilized to enhance the penetration of the administered nucleic acids, including glycols such as ethylene glycol and propylene glycol, pyrrols such as 2-pyrrol, azones, and terpenes such as limonene and menthone.

### Carriers

[0489] Certain compositions of the present disclosure also incorporate carrier compounds in the formulation. As used herein, “carrier compound” or “carrier” can refer to a nucleic acid, or analog thereof, which is inert (i.e., does not possess biological activity per se) but is recognized as a nucleic acid by in vivo processes that reduce the bioavailability of a nucleic acid having biological activity by, for example, degrading the biologically active nucleic acid or promoting its removal from circulation. The coadministration of a nucleic acid and a carrier compound, typically with an excess of the latter substance, can result in a substantial reduction of the amount of nucleic acid recovered in the liver, kidney or other extracirculatory reservoirs, presumably due to competition between the carrier compound and the nucleic acid for a common receptor. For example, the recovery of a partially phosphorothioate dsRNA in hepatic tissue can be reduced when it is coadministered with polyinosinic acid, dextran sulfate, polycytidic acid or 4-acetamido-4′isothiocyano-stilbene-2,2′-disulfonic acid (Miyao et al., DsRNA Res. Dev., 1995, 5, 115-121; Takakura et al., DsRNA & Nucl. Acid Drug Dev., 1996, 6, 177-183).

### Excipients

[0490] In contrast to a carrier compound, a “pharmaceutical carrier” or “excipient” is a pharmaceutically acceptable solvent, suspending agent or any other pharmacologically inert vehicle for delivering one or more nucleic acids to an animal. The excipient may be liquid or solid and is selected, with the planned manner of administration in mind, so as to provide for the desired bulk, consistency, etc., when combined with a nucleic acid and the other components of a given pharmaceutical composition. Typical pharmaceutical carriers include, but are not limited to, binding agents (e.g., pregelatinized maize starch, polyvinylpyrrolidone or hydroxypropyl methylcellulose, etc.); fillers (e.g., lactose and other sugars, microcrystalline cellulose, pectin, gelatin, calcium sulfate, ethyl cellulose, polyacrylates or calcium hydrogen phosphate, etc.); lubricants (e.g., magnesium stearate, talc, silica, colloidal silicon dioxide, stearic acid, metallic stearates, hydrogenated vegetable oils, corn starch, polyethylene glycols, sodium benzoate, sodium acetate, etc.); disintegrants (e.g., starch, sodium starch glycolate, etc.); and wetting agents (e.g., sodium lauryl sulphate, etc).

[0491] Pharmaceutically acceptable organic or inorganic excipients suitable for non-parenteral administration which do not deleteriously react with nucleic acids can also be used to formulate the compositions of the present disclosure. Suitable pharmaceutically acceptable carriers include, but are not limited to, water, salt solutions, alcohols, polyethylene glycols, gelatin, lactose, amylose, magnesium stearate, talc, silicic acid, viscous paraffin, hydroxymethylcellulose, polyvinylpyrrolidone and the like.

[0492] Formulations for topical administration of nucleic acids may include sterile and non-sterile aqueous solutions, non-aqueous solutions in common solvents such as alcohols, or solutions of the nucleic acids in liquid or solid oil bases. The solutions may also contain buffers, diluents and other suitable additives. Pharmaceutically acceptable organic or inorganic excipients suitable for non-parenteral administration which do not deleteriously react with nucleic acids can be used.

[0493] Suitable pharmaceutically acceptable excipients include, but are not limited to, water, salt solutions, alcohol, polyethylene glycols, gelatin, lactose, amylose, magnesium stearate, talc, silicic acid, viscous paraffin, hydroxymethylcellulose, polyvinylpyrrolidone and the like.

### Other Components

[0494] The compositions of the present disclosure may additionally contain other adjunct components conventionally found in pharmaceutical compositions, at their art-established usage levels. Thus, for example, the compositions may contain additional, compatible, pharmaceutically-active materials such as, for example, antipruritics, astringents, local anesthetics or anti-inflammatory agents, or may contain additional materials useful in physically formulating various dosage forms of the compositions of the present disclosure, such as dyes, flavoring agents, preservatives, antioxidants, opacifiers, thickening agents and stabilizers. However, such materials, when added, should not unduly interfere with the biological activities of the components of the compositions of the present disclosure. The formulations can be sterilized and, if desired, mixed with auxiliary agents, e.g., lubricants, preservatives, stabilizers, wetting agents, emulsifiers, salts for influencing osmotic pressure, buffers, colorings, flavorings and/or aromatic substances and the like which do not deleteriously interact with the nucleic acid(s) of the formulation.

[0495] Aqueous suspensions may contain substances that increase the viscosity of the suspension including, for example, sodium carboxymethylcellulose, sorbitol and/or dextran. The suspension may also contain stabilizers.

[0496] In some embodiments, pharmaceutical compositions featured in the disclosure include (a) one or more iRNA compounds and (b) one or more biologic agents which function by a non-RNAi mechanism. Examples of such biologic agents include agents that interfere with an interaction of LECT2 and at least one LECT2 binding partner.

[0497] Toxicity and therapeutic efficacy of such compounds can be determined by standard pharmaceutical procedures in cell cultures or experimental animals, e.g., for determining the LD50 (the dose lethal to 50% of the population) and the ED50 (the dose therapeutically effective in 50% of the population). The dose ratio between toxic and therapeutic effects is the therapeutic index and it can be expressed as the ratio LD50/ED50. Compounds that exhibit high therapeutic indices are typical.

[0498] The data obtained from cell culture assays and animal studies can be used in formulating a range of dosage for use in humans. The dosage of compositions featured in the disclosure lies generally within a range of circulating concentrations that include the ED50 with little or no toxicity. The dosage may vary within this range depending upon the dosage form employed and the route of administration utilized. For any compound used in the methods featured in the disclosure, the therapeutically effective dose can be estimated initially from cell culture assays. A dose may be formulated in animal models to achieve a circulating plasma concentration range of the compound or, when appropriate, of the polypeptide product of a target sequence (e.g., achieving a decreased concentration of the polypeptide) that includes the IC50 (i.e., the concentration of the test compound which achieves a half-maximal inhibition of symptoms) as determined in cell culture. Such information can be used to more accurately determine useful doses in humans. Levels in plasma may be measured, for example, by high performance liquid chromatography.

[0499] In addition to their administration, as discussed above, the iRNAs featured in the disclosure can be administered in combination with other known agents effective in treatment of diseases or disorders related to LECT2 expression. In any event, the administering physician can adjust the amount and timing of iRNA administration on the basis of results observed using standard measures of efficacy known in the art or described herein.

### Methods of Treating Disorders Related to Expression of a LECT2 Gene

[0500] The present disclosure relates to the use of an iRNA targeting LECT2 to inhibit LECT2 expression and/or to treat a disease, disorder, or pathological process that is related to LECT2 expression.

[0501] In one aspect, a method of treatment of a disorder related to expression of LECT2 is provided, the method comprising administering an iRNA (e.g., a dsRNA) disclosed herein to a subject in need thereof. In some embodiments, the iRNA inhibits (decreases) LECT2 expression. In some embodiments, the iRNA increases LECT2 expression.

[0502] As used herein, “a disorder related to LECT2 expression,” a “disease related to LECT2 expression, a “pathological process related to LECT2 expression,” or the like includes any condition, disorder, or disease in which LECT2 expression is altered (e.g., decreased or increased relative to a normal level). In some embodiments, LECT2 expression is decreased. In some embodiments, LECT2 expression is increased. In some embodiments, the decrease or increase in LECT2 expression is detectable in the blood (e.g., in the plasma) of the subject. In some embodiments, the decrease or increase in LECT2 expression is detectable in a tissue sample from the subject (e.g., in a kidney sample or a liver sample). The decrease or increase may be assessed relative the level observed in the same individual prior to the development of the disorder or relative to other individual(s) who do not have the disorder. The decrease or increase may be limited to a particular organ, tissue, or region of the body (e.g., the kidney or the liver).

[0503] As used herein, a “subject” to be treated according to the methods described herein, includes a human or non-human animal, e.g., a mammal. The mammal may be, for example, a rodent (e.g., a rat or mouse) or a primate (e.g., a monkey). In some embodiments, the subject is a human.

[0504] A “subject in need thereof” includes a subject having, suspected of having, or at risk of developing a disorder related to LECT2 expression. In some embodiments, the subject has, or is suspected of having, a disorder related to LECT2 expression. In some embodiments, the subject is at risk of developing a disorder related to LECT2 expression.

[0505] In some embodiments, the subject is an animal that serves as a model for a disorder related to LECT2 expression, e.g., a LECT2 amyloidosis.

### LECT2 Amyloidosis

[0506] In some embodiments, the disorder related to LECT2 expression is an amyloidosis, e.g., a LECT2 amyloidosis. LECT2 amyloidosis has been described in several clinical studies. See, e.g., Benson, M. D. et al (2008) Kidney International, 74: 218-222; Murphy, C. L. et al. (2010) Am J Kidney Dis, 56(6):1100-1107; Larsen, C. P. et al. (2010) Kidney Int., 77(9):816-819; Holanda, D. G. et al. (20011) Nephrol. Dial. Transplant., 26 (1): 373-376; and Sethi, S. et al. (2012) Kidney International 82, 226-234 (hereinafter Sethi et al.).

[0507] Clinical and pathological features of LECT2 amyloidosis mimic those of amyloid light chain (AL) amyloidosis. These symptoms include, e.g., symptoms of kidney disease and renal failure, e.g., fluid retention, swelling, and shortness of breath. Amyloidosis may affect the heart, peripheral nervous system, gastrointestinal tract, blood, lungs and skin. Heart complications include, e.g., heart failure and irregular heartbeat. Other symptoms include, e.g., stroke, gastrointestinal disorders, enlarged liver, diminished spleen function, diminished function of the adrenal and other endocrine glands, skin color change or growths, lung problems, bleeding and bruising problems, fatigue and weight loss. In some embodiments, the methods described herein are associated with improvement in one or more symptoms described herein.

[0508] Methods for diagnosis of amyloidosis, e.g., LECT2 amyloidosis, are described, e.g., in Leung, N. et al. (2010) Blood, published online Sep. 4, 2012; DOI 10.1182/blood-2012-03-413682; Shiller, S. M. et al. (2011). Laboratory Methods for the Diagnosis of Hereditary Amyloidoses, Amyloidosis—Mechanisms and Prospects for Therapy, Dr. Svetlana Sarantseva (Ed.), ISBN: 978-953-307-253-1; Sethi et al. (see above) and in U.S. Patent Application Publication No. 20100323381.

[0509] Based on the results provided by Sethi et al., LECT2 amyloidosis accounts for a significant percentage of cases of renal amyloidosis. See Table 1 of Sethi et al., which shows that 26 out of 127 cases of renal amyloidosis studied by laser microdissection and mass spectrometry of renal biopsy and/or nephrectomy specimens were determined to be of the LECT2 amyloid type. Sethi et al. further report that apolipoprotein E protein and serum amyloid P component (SAP) were also present in all cases of LECT2 amyloidosis.

[0510] In some embodiments, the amyloidosis, e.g., the LECT2 amyloidosis, involves systemic amyloid deposition. In some embodiments, the amyloidosis, e.g., the LECT2 amyloidosis, is localized entirely or predominately to a particular tissue or organ (e.g., to the kidney or liver).

[0511] In some embodiments, the amyloidosis, e.g., the LECT2 amyloidosis, is hereditary.

[0512] In some embodiments, a LECT2 amyloidosis is diagnosed using analysis of a sample from the subject (e.g., a biopsy sample). In some embodiments, the biopsy sample is a renal biopsy. In some embodiments, the sample is a nephrectomy sample. In some embodiments, the sample is from a liver biopsy or from other resected liver tissue. In some embodiments, the sample is analyzed using methods selected from one or more of immunohistochemistry, LECT2 immunoassay, electron microscopy, laser microdissection, and mass spectrometry. In some embodiments, the LECT2 amyloidosis is diagnosed using laser microdissection and mass spectrometry.

[0513] In some embodiments, the amyloidosis, e.g., the LECT2 amyloidosis, affects the kidney, e.g., involves amyloid deposition in the kidney. In some embodiments, kidney function is compromised as a result of the amyloidosis. In some embodiments, the subject suffers from one or more of fluid retention, swelling, and shortness of breath. In some embodiments, the subject has nephrotic syndrome. In some embodiments, the subject suffers from proteinuria. In some embodiments, the subject has renal failure.

[0514] In some embodiments, the amyloidosis, e.g., the LECT2 amyloidosis, affects the liver, e.g., involves amyloid deposition in the liver. In some embodiments, liver function is compromised as a result of the amyloidosis. In some embodiments, the subject has hepatitis, e.g., chronic hepatitis. In some embodiments, the hepatitis is a viral hepatitis.

[0515] LECT2 amyloidosis has been found to be particularly prevalent in Mexican Americans and has also been associated with homozygosity for the G allele of the LECT2 gene that encodes valine at position 40 in the mature protein (amino acid 58 in the unprocessed protein). See, e.g., Benson, M. D. et al. (2008) Kidney International, 74: 218-222; Murphy, C. L. et al. (2010) Am J Kidney Dis, 56(6):1100-1107.

[0516] In some embodiments, the subject is of Mexican descent. In some embodiments, the subject is a Mexican American.

[0517] In some embodiments, the subject carries the G allele of the LECT2 gene that encodes valine at position 40 in the mature protein (amino acid 58 in the unprocessed protein). In some embodiments, the subject is homozygous for the G allele (G/G genotype). In some embodiments, a LECT2 protein expressed in the subject has valine at position 40 in the mature protein (or at amino acid 58 in the unprocessed protein).

[0518] In some embodiments, the method decreases LECT2 expression. In some embodiments, the decrease in LECT2 expression is assessed relative to the level in the same individual prior to the treatment. In some embodiments, the method is shown to decrease LECT2 expression by comparing the levels of LECT2 expression in a treated subject (or group of subjects) with the levels in a control subject (or group of subjects), e.g., an untreated subject (or group of subjects) or a subject (or group of subjects) treated with a control treatment (e.g., an iRNA (e.g., a dsRNA) that does not target LECT2).

[0519] In some embodiments, the method reduces amyloid deposition, e.g., deposition of amyloid comprising a LECT2 protein or a portion thereof. In some embodiments, the protein is a wild type protein. In some embodiments, the protein is a human LECT2 protein, or a portion thereof, that includes valine at position 40 (position 40 of the mature, secreted protein, or at amino acid 58 in the unprocessed protein, as described herein). In some embodiments, the method decreases the size, number, and/or extent of amyloid deposits.

[0520] In some embodiments, the method decreases one or more symptoms associated with amyloid deposition.

[0521] In some embodiments, the dsRNA is administered in a form that targets the dsRNA to a particular organ or tissue to inhibit amyloid deposition in the organ or tissue.

[0522] In some embodiments, the dsRNA is targeted to the liver. In some embodiments, the dsRNA is conjugated to a ligand, e.g., a GalNAc ligand (e.g., a GalNAc ligand as described herein) that targets the dsRNA to the liver (e.g., to hepatocytes).

[0523] Also provided herein is a method of reducing amyloid deposition, the method comprising administering a dsRNA as disclosed herein to a subject in need thereof (e.g., a subject having, suspected of having, or at risk for developing a LECT2 amyloidosis). In some embodiments, the method decreases (e.g., prevents or diminishes) the size, number, and/or extent of amyloid deposits. The size, number, and/or extent of amyloid deposits may be assessed using any method known in the art (e.g., immunoassay, immunohistochemistry, mass spectrometry). The reduction of amyloid deposition may involve a decrease in amyloid deposition (e.g., size, number, and/or extent of amyloid deposits) of at least 5%, 10%, 15%, 20%, 25%, 30%, 35%, 40%, 45%, 50% or more.

[0524] In the methods provided herein, the iRNA (e.g., dsRNA) and compositions thereof are administered in a therapeutically effective amount. Therapeutic effects of administration of a LECT2 siRNA can be established, for example, by comparison with an appropriate control. For example, inhibition of amyloid deposition may be established, for example, in a group of patients with amyloidosis (e.g., LECT2 amyloidosis) by comparison of any appropriate parameter (e.g., a parameter assessing the size, number, or extent of amyloid deposition) with the same parameter in an appropriate control group. A control group (e.g., a group of similar individuals or the same group of individuals in a crossover design) may include, for example, an untreated population, a population that has been treated with a conventional treatment; a population that has been treated with placebo or a non-targeting iRNA; and the like.

### Rheumatoid Arthritis

[0525] Rheumatoid arthritis is also a disorder related to LECT2 expression. In particular, in a Japanese population, it was found that possession of one A allele of the LECT2 gene that encodes isoleucine at position 40 in the mature protein (or amino acid 58 in the unprocessed protein) was found to increase the overall risk of developing rheumatoid arthritis. Possessing two A alleles was strongly associated with disease severity. See Kameoka, Y. et al. (2000) Arth Rheum, 43(6):1419-20.

[0526] In one embodiment of the methods provided herein, the disorder related to LECT2 expression is rheumatoid arthritis. In one embodiment, the dsRNA inhibits LECT2 expression in a subject having rheumatoid arthritis. In some such embodiments, the dsRNA inhibits LECT2 expression in synovial tissue and/or in synovial fluid-derived cells (e.g., mononuclear cells and fibroblasts). In some embodiments, the dsRNA targets an mRNA that encodes isoleucine at position 40 in the mature protein (amino acid 58 in the unprocessed protein).

### Liver INJURY

[0527] LECT2 expression can increase during acute liver injury.

[0528] In one embodiment of the methods provided herein, the disorder related to LECT2 expression is acute liver injury. In some embodiments, the iRNA (e.g., dsRNA) modulates (e.g., increases or decreases) LECT2 expression. In some embodiments, the iRNA modulates LECT2 expression in the liver. In some embodiments, the iRNA decreases LECT2 expression in the liver. In some embodiments, the iRNA increases LECT2 expression in the liver.

### Combination Therapies

[0529] In some embodiments, an iRNA (e.g., a dsRNA) disclosed herein is administered in combination with a second therapy (e.g., one or more additional therapies) known to be effective in treating a disorder related to LECT2 expression (e.g., a LECT2 amyloidosis) or a symptom of such a disorder. The iRNA may be administered before, after, or concurrent with the second therapy. In some embodiments, the iRNA is administered before the second therapy. In some embodiments, the iRNA is administered after the second therapy. In some embodiments, the iRNA is administered concurrent with the second therapy.

[0530] The second therapy may be an additional therapeutic agent. The iRNA and the additional therapeutic agent can be administered in combination in the same composition or the additional therapeutic agent can be administered as part of a separate composition.

[0531] In some embodiments, the second therapy is a non-iRNA therapeutic agent that is effective to treat the disorder or symptoms of the disorder.

[0532] In some embodiments, the disorder to be treated by the compositions or methods disclosed herein is a LECT2 amyloidosis that affects kidney function, e.g., through amyloid deposition in the kidney. In some such embodiments, the iRNA is administered in conjunction with a therapy that supports kidney function (e.g., dialysis, a diuretic, an angiotensin converting enzyme (ACE) inhibitor, an angiotensin receptor blocker (ARB), or dialysis).

[0533] In some embodiments, the disorder to be treated by the compositions or methods disclosed herein is a LECT2 amyloidosis involving amyloid deposits in the liver. In some such embodiments, the iRNA is administered in conjunction with a therapy that supports liver function.

[0534] In some embodiments, the disorder to be treated by the compositions or methods disclosed herein is a LECT2 amyloidosis, and the iRNA is administered in conjunction with removal of all or part of the organ(s) affected by the amyloidosis (e.g., resection of all or part of kidney or liver tissue affected by the amyloidosis). The removal is optionally conducted in conjunction with a replacement of all or part of the organ removed (e.g., in conjunction with a kidney or liver organ transplant).

### Administration Dosages, Routes, and Timing

[0535] A subject (e.g., a human subject, e.g., a patient) can be administered a therapeutic amount of iRNA. The therapeutic amount can be, e.g., 0.05-50 mg/kg. For example, the therapeutic amount can be 0.05, 0.1, 0.2, 0.3, 0.4, 0.5, 0.6, 0.7, 0.8, 0.9, 1.0, 1.5, 2.0, or 2.5, 3.0, 3.5, 4.0, 4.5, 5, 10, 15, 20, 25, 30, 35, 40, 45, or 50 mg/kg dsRNA.

[0536] In some embodiments, the iRNA is formulated for delivery to a target organ, e.g., to the liver.

[0537] In some embodiments, the iRNA is formulated as a lipid formulation, e.g., an LNP formulation as described herein. In some such embodiments, the therapeutic amount is 0.05-5 mg/kg, e.g., 0.05, 0.1, 0.2, 0.3, 0.4, 0.5, 0.6, 0.7, 0.8, 0.9, 1.0, 1.5, 2.0, 2.5, 3.0, 3.5, 4.0, 4.5, or 5.0 mg/kg dsRNA. In some embodiments, the lipid formulation, e.g., LNP formulation, is administered intravenously. In some embodiments, the iRNA (e.g., dsRNA) is formulated as an LNP formulation and is administered (e.g., intravenously administered) at a dose of 0.1 to 0.5 mg/kg.

[0538] In some embodiments, the iRNA is administered by intravenous infusion over a period of time, such as over a 5 minute, 10 minute, 15 minute, 20 minute, or 25 minute period. In some embodiments, the iRNA is in the form of a GalNAc conjugate as described herein. In some such embodiments, the therapeutic amount is 0.5-50 mg, e.g., 0.5, 0.6, 0.7, 0.8, 0.9, 1.0, 1.5, 2.0, 2.5, 3.0, 3.5, 4.0, 4.5, 5.0, 6, 7, 8, 9, 10, 15, 20, 25, 30, 35, 40, 45, or 50 mg/kg dsRNA. In some embodiments, the GalNAc conjugate is administered subcutaneously. In some embodiments, the iRNA (e.g., dsRNA) is in the form of a GalNAc conjugate and is administered (e.g., subcutaneously administered) at a dose of 1 to 10 mg/kg.

[0539] In some embodiments, the administration is repeated, for example, on a regular basis, such as, daily, biweekly (i.e., every two weeks) for one month, two months, three months, four months or longer. After an initial treatment regimen, the treatments can be administered on a less frequent basis. For example, after administration biweekly for three months, administration can be repeated once per month, for six months or a year or longer.

[0540] In some embodiments, the iRNA agent is administered in two or more doses. In some embodiments, the number or amount of subsequent doses is dependent on the achievement of a desired effect, e.g., inhibition of amyloid deposition, or the achievement of a therapeutic or prophylactic effect, e.g., reduction or prevention of one or more symptoms associated with the disorder.

[0541] In some embodiments, the iRNA agent is administered according to a schedule. For example, the iRNA agent may be administered once per week, twice per week, three times per week, four times per week, or five times per week. In some embodiments, the schedule involves regularly spaced administrations, e.g., hourly, every four hours, every six hours, every eight hours, every twelve hours, daily, every 2 days, every 3 days, every 4 days, every 5 days, weekly, biweekly, or monthly. In some embodiments, the iRNA agent is administered at the frequency required to achieve a desired effect.

[0542] In some embodiments, the schedule involves closely spaced administrations followed by a longer period of time during which the agent is not administered. For example, the schedule may involve an initial set of doses that are administered in a relatively short period of time (e.g., about every 6 hours, about every 12 hours, about every 24 hours, about every 48 hours, or about every 72 hours) followed by a longer time period (e.g., about 1 week, about 2 weeks, about 3 weeks, about 4 weeks, about 5 weeks, about 6 weeks, about 7 weeks, or about 8 weeks) during which the iRNA agent is not administered. In one embodiment, the iRNA agent is initially administered hourly and is later administered at a longer interval (e.g., daily, weekly, biweekly, or monthly). In another embodiment, the iRNA agent is initially administered daily and is later administered at a longer interval (e.g., weekly, biweekly, or monthly). In certain embodiments, the longer interval increases over time or is determined based on the achievement of a desired effect.

[0543] Before administration of a full dose of the iRNA, patients can be administered a smaller dose, such as a 5% infusion dose, and monitored for adverse effects, such as an allergic reaction, or for elevated lipid levels or blood pressure. In another example, the patient can be monitored for unwanted effects.

### Methods for Modulating Expression of a LECT2 Gene

[0544] In yet another aspect, the disclosure provides a method for modulating (e.g., inhibiting or activating) the expression of LECT2 gene, e.g., in a cell or in a subject. In some embodiments, the cell is ex vivo, in vitro, or in vivo. In some embodiments, the cell is in the liver (e.g., a hepatocyte). In some embodiments, the cell is in a subject (e.g., a mammal, such as, for example, a human). In some embodiments, the subject (e.g., the human) is at risk, or is diagnosed with a disorder related to expression of LECT2 expression, as described herein.

[0545] In one embodiment, the method includes contacting the cell with an iRNA as described herein, in an amount effective to decrease the expression of a LECT2 gene in the cell. “Contacting,” as used herein, includes directly contacting a cell, as well as indirectly contacting a cell. For example, a cell within a subject may be contacted when a composition comprising an iRNA is administered (e.g., intravenously or subcutaneously) to the subject.

[0546] The expression of a LECT2 gene may be assessed based on the level of expression of a LECT2 mRNA, a LECT2 protein, or the level of another parameter functionally linked to the level of expression of a LECT2 gene. In some embodiments, the expression of LECT2 is inhibited by at least 5%, at least 10%, at least 15%, at least 20%, at least 25%, at least 30%, at least 35%, at least 40%, at least 45%, at least 50%, at least 55%, at least 60%, at least 65%, at least 70%, at least 75%, at least 80%, at least 85%, at least 90%, or at least 95%. In some embodiments, the iRNA has an IC₅₀ in the range of 0.001-0.01 nM, 0.001-0.10 nM, 0.001-1.0 nM, 0.001-10 nM, 0.01-0.05 nM, 0.01-0.50 nM, 0.02-0.60 nM, 0.01-1.0 nM, 0.01-1.5 nM, 0.01-10 nM. The IC₅₀ value may be normalized relative to an appropriate control value, e.g., the IC₅₀ of a non-targeting iRNA.

[0547] In some embodiments, the method includes introducing into the cell an iRNA as described herein and maintaining the cell for a time sufficient to obtain degradation of the mRNA transcript of a LECT2 gene, thereby inhibiting the expression of the LECT2 gene in the cell.

[0548] In one embodiment, the method includes administering a composition described herein, e.g., a composition comprising an iRNA that targets LECT2, to the mammal such that expression of the target LECT2 gene is decreased, such as for an extended duration, e.g., at least two, three, four days or more, e.g., one week, two weeks, three weeks, or four weeks or longer. In some embodiments, the decrease in expression of LECT2 is detectable within 1 hour, 2 hours, 4 hours, 8 hours, 12 hours, or 24 hours of the first administration.

[0549] In another embodiment, the method includes administering a composition as described herein to a mammal such that expression of the target LECT2 gene is increased by e.g., at least 10% compared to an untreated animal. In some embodiments, the activation of LECT2 occurs over an extended duration, e.g., at least two, three, four days or more, e.g., one week, two weeks, three weeks, four weeks, or more. Without wishing to be bound by theory, an iRNA can activate LECT2 expression by stabilizing the LECT2 mRNA transcript, interacting with a promoter in the genome, and/or inhibiting an inhibitor of LECT2 expression.

[0550] The iRNAs useful for the methods and compositions featured in the disclosure specifically target RNAs (primary or processed) of a LECT2 gene. Compositions and methods for inhibiting the expression of a LECT2 gene using iRNAs can be prepared and performed as described elsewhere herein.

[0551] In one embodiment, the method includes administering a composition containing an iRNA, where the iRNA includes a nucleotide sequence that is complementary to at least a part of an RNA transcript of the LECT2 gene of the subject, e.g., the mammal, e.g., the human, to be treated. The composition may be administered by any appropriate means known in the art including, but not limited to oral, intraperitoneal, or parenteral routes, including intracranial (e.g., intraventricular, intraparenchymal and intrathecal), intravenous, intramuscular, subcutaneous, transdermal, airway (aerosol), nasal, rectal, and topical (including buccal and sublingual) administration.

[0552] In certain embodiments, the composition is administered by intravenous infusion or injection. In some such embodiments, the composition comprises a lipid formulated siRNA (e.g., an LNP formulation, such as an LNP11 formulation) for intravenous infusion.

[0553] In other embodiments, the composition is administered subcutaneously. In some such embodiments, the composition comprises an iRNA conjugated to a GalNAc ligand. In some such embodiments, the ligand targets the iRNA to the liver (e.g., to hepatocytes).

[0554] Unless otherwise defined, all technical and scientific terms used herein have the same meaning as commonly understood by one of ordinary skill in the art to which this disclosure belongs. Although methods and materials similar or equivalent to those described herein can be used in the practice or testing of the iRNAs and methods featured in the disclosure, suitable methods and materials are described below. All publications, patent applications, patents, and other references mentioned herein are incorporated by reference in their entirety. In case of conflict, the present specification, including definitions, will control. In addition, the materials, methods, and examples are illustrative only and not intended to be limiting.

### SPECIFIC EMBODIMENTS

[0555] 1. A double-stranded ribonucleic acid (dsRNA) for inhibiting expression of LECT2, wherein said dsRNA comprises a sense strand and an antisense strand, the antisense strand comprising a region of complementarity to a LECT2 RNA transcript, which antisense strand comprises at least 15 contiguous nucleotides differing by no more than 3 nucleotides from one of the antisense sequences listed in Tables 2A-2B, 3A-3B, 6, or 7, or a pharmaceutically acceptable salt thereof.

[0556] 2. A double-stranded ribonucleic acid (dsRNA) for inhibiting expression of LECT2, wherein said dsRNA comprises a sense strand that is 15-30 nucleotides in length and an antisense strand that is 15-30 nucleotides in length and the antisense strand is complementary to at least 15 contiguous nucleotides of a target sequence listed in Table 2A, 2B, 3A, 3B, 6, or 7, or a pharmaceutically acceptable salt thereof.

[0557] 3. The dsRNA of embodiment 1 or 2, wherein said dsRNA comprises at least one modified nucleotide.

[0558] 4. The dsRNA agent of embodiment 3, wherein no more than five of the sense strand nucleotides and not more than five of the nucleotides of the antisense strand are unmodified nucleotides.

[0559] 5. The dsRNA agent of embodiment 3, wherein all of the nucleotides of the sense strand and all of the nucleotides of the antisense strand comprise a modification.

[0560] 6. The dsRNA of any of the preceding embodiments, wherein the dsRNA comprises a duplex region that is 15-30 base pairs in length.

[0561] 7. The dsRNA of embodiment 6, wherein the duplex region is 17-25 base pairs in length.

[0562] 8. The dsRNA of embodiment 6 or 7, wherein the duplex region is 19-22 base pairs in length.

[0563] 9. The dsRNA of any of embodiments 6-8, wherein the duplex region is 21 base pairs in length.

[0564] 10. The dsRNA of any of the preceding embodiments, wherein the antisense strand comprises a nucleotide sequence comprising at least 15 contiguous nucleotides, with 0, 1, 2, or 3 mismatches, from one of the antisense sequences listed in any one of Tables 2A, 2B, 3A, 3B, 6, or 7.

[0565] 11. The dsRNA agent of any of the preceding embodiments, wherein the sense strand comprises a nucleotide sequence comprising at least 15 contiguous nucleotides, with 0, 1, 2, or 3 mismatches, from a sense sequence listed in any one of Tables 2A, 2B, 4A, 4B, 5A, 5B, 6A, and 6B that corresponds to the antisense sequence.

[0566] 12. The dsRNA of any of the preceding embodiments, wherein the antisense strand comprises a nucleotide sequence comprising at least 17 contiguous nucleotides, with 0, 1, 2, or 3 mismatches, from one of the antisense sequences listed in any one of Tables 2A, 2B, 3A, 3B, 6, or 7.

[0567] 13. The dsRNA agent of any of the preceding embodiments, wherein the sense strand comprises a nucleotide sequence comprising at least 17 contiguous nucleotides, with 0, 1, 2, or 3 mismatches, from a sense sequence listed in any one of Tables 2A, 2B, 4A, 4B, 5A, 5B, 6A, and 6B that corresponds to the antisense sequence.

[0568] 14. The dsRNA of any of the preceding embodiments, wherein the antisense strand comprises a nucleotide sequence comprising at least 19 contiguous nucleotides, with 0, 1, 2, or 3 mismatches, from one of the antisense sequences listed in any one of Tables 2A, 2B, 3A, 3B, 6, or 7.

[0569] 15. The dsRNA agent of any of the preceding embodiments, wherein the sense strand comprises a nucleotide sequence comprising at least 19 contiguous nucleotides, with 0, 1, 2, or 3 mismatches, from a sense sequence listed in any one of Tables 2A, 2B, 4A, 4B, 5A, 5B, 6A, and 6B that corresponds to the antisense sequence.

[0570] 16. The dsRNA of any of the preceding embodiments, wherein the antisense strand comprises a nucleotide sequence comprising at least 21 contiguous nucleotides, with 0, 1, 2, or 3 mismatches, from one of the antisense sequences listed in any one of Tables 2A, 2B, 3A, 3B, 6, or 7.

[0571] 17. The dsRNA agent of any of the preceding embodiments, wherein the sense strand comprises a nucleotide sequence comprising at least 21 contiguous nucleotides, with 0, 1, 2, or 3 mismatches, from a sense sequence listed in any one of Tables 2A, 2B, 4A, 4B, 5A, 5B, 6A, and 6B that corresponds to the antisense sequence.

[0572] 18. The dsRNA of any of embodiments 1-17, wherein the region of complementarity is at least 17 nucleotides in length.

[0573] 19. The dsRNA of any of embodiments 1-18, wherein the region of complementarity is between 21 and 25 nucleotides in length.

[0574] 20. The dsRNA of any of embodiments 1-19, wherein the region of complementarity is 23 nucleotides in length.

[0575] 21. The dsRNA of any of the preceding embodiments, wherein each strand is no more than 30 nucleotides in length.

[0576] 22. The dsRNA of any of the preceding embodiments, wherein at least one strand comprises a 3′ overhang of at least 1 nucleotide or 2 nucleotides.

[0577] 23. The dsRNA of any of the preceding embodiments, wherein dsRNA comprises a blunt end.

[0578] 24. The dsRNA of any of embodiments 3-23, wherein at least one of said modified nucleotides is chosen from the group consisting of: a 2′-O-methyl modified nucleotide, a nucleotide comprising a 5′-phosphorothioate group, and a terminal nucleotide linked to a cholesteryl derivative or dodecanoic acid bisdecylamide group.

[0579] 25. The dsRNA of any of embodiments 3-24, wherein at least one of said modified nucleotides is chosen from the group consisting of: a 2′-deoxy-2′-fluoro modified nucleotide, a 2′-deoxy-modified nucleotide, a locked nucleic acid (LNA), an acyclic nucleotide, an abasic nucleotide, a glycol nucleotide (GNA), 2′-amino-modified nucleotide, 2′-alkyl-modified nucleotide, morpholino nucleotide, a phosphoramidate, and a non-natural base comprising nucleotide.

[0580] 26. The dsRNA of any of embodiments 3-25, wherein the modifications on the nucleotides are selected from the group consisting of a locked nucleic acid (LNA), an acyclic nucleotide, a hexitol or hexose nucleic acid (HNA), a cyclohexene nucleic acid (CeNA), a glycol nucleic acid (GNA), 2′-methoxyethyl, 2′-O-alkyl, 2′-O-allyl, 2′-C-allyl, 2′-fluoro, 2′-O-methyl, 2′-deoxy, 2′-hydroxyl, and combinations thereof.

[0581] 27. The dsRNA of any of embodiments 3-26, wherein the modifications on the nucleotides are 2′-O-methyl, 2′-fluoro, or both, and optionally GNA.

[0582] 28. The dsRNA of any of embodiments 3-27, wherein no more than five of the sense strand nucleotides and not more than five of the nucleotides of the antisense strand include modifications other than 2′-O-methyl modified nucleotide, a 2′-fluoro modified nucleotide, a 2′-deoxy-modified nucleotide, unlocked nucleic acids (UNA) or glycerol nucleic acid (GNA).

[0583] 29. The dsRNA agent of any of the preceding embodiments, wherein the agent comprises at least one phosphorothioate or methylphosphonate internucleotide linkage.

[0584] 30. The dsRNA agent of embodiment 29, wherein the phosphorothioate or methylphosphonate internucleotide linkage is at the 3′-terminus of one strand.

[0585] 31. The dsRNA agent of embodiment 30, wherein the strand is the antisense strand.

[0586] 32. The dsRNA agent of embodiment 30, wherein the strand is the sense strand.

[0587] 33. The dsRNA agent of embodiment 30, wherein the phosphorothioate or methylphosphonate internucleotide linkage is at the 5′-terminus of one strand.

[0588] 34. The dsRNA agent of embodiment 33, wherein the strand is the antisense strand.

[0589] 35. The dsRNA agent of embodiment 33, wherein the strand is the sense strand.

[0590] 36. The dsRNA agent of embodiment 29, wherein each of the 5′- and 3′-terminus of one strand comprises a phosphorothioate or methylphosphonate internucleotide linkage.

[0591] 37. The dsRNA agent of embodiment 36, wherein the strand is the antisense strand.

[0592] 38. The dsRNA agent of any of the preceding embodiment, wherein the base pair at the 1 position of the 5′-end of the antisense strand of the duplex is an AU base pair.

[0593] 39. The dsRNA agent of embodiment 36, wherein the sense strand has a total of 21 nucleotides and the antisense strand has a total of 23 nucleotides.

[0594] 40. The dsRNA of any of the preceding embodiments wherein the sense strand is conjugated to at least one ligand.

[0595] 41. The dsRNA of embodiment 40, wherein the ligand is attached to the 3′ end of the sense strand.

[0596] 42. The dsRNA of embodiment 40 or 41, wherein the ligand comprises a carbohydrate.

[0597] 43. The dsRNA of any of embodiments 40-42, wherein the ligand is a GalNAc ligand.

[0598] 44. The dsRNA of any of embodiments 40-43, wherein the ligand is

[chemical structure]

[0599] 45. The dsRNA of any of embodiments 40-44, wherein the ligand is attached via a linker.

[0600] 46. The dsRNA of embodiment 45, wherein the linker is a bivalent or trivalent branched linker.

[0601] 47. The dsRNA of embodiment 45, wherein the ligand and linker are as shown in Formula XXIV:

[chemical structure]

[0602] 48. The dsRNA of any of embodiments 40-47, wherein the ligand targets the dsRNA to hepatocytes.

[0603] 49. The dsRNA of any of the preceding embodiments, wherein the region of complementarity consists of an antisense sequence selected from the antisense sequences disclosed in Tables 2A-2B, 3A-3B, 6 or 7.

[0604] 50. The dsRNA of any of the preceding embodiments, wherein the dsRNA comprises a sense strand consisting of a sense sequence selected from the sense sequences disclosed in Tables 2A-2B, 3A-3B, 6 or 7, and an antisense strand consisting of an antisense sequence selected from the antisense sequences disclosed in Tables 2A-2B, 3A-3B, 6 or 7.

[0605] 51. A double-stranded ribonucleic acid (dsRNA) for inhibiting expression of LECT2, wherein said dsRNA comprises a sense strand and an antisense strand, the antisense strand comprising a region of complementarity to a LECT2 RNA transcript, wherein the sense strand comprises the sequence and all of the modifications of gsgsucagAfuCfUfUfcaaaauaaauL96 (SEQ ID NO: 143) and the antisense strand comprises the sequence and all of the modifications of asUfsuuaUfuUfUfgaagAfuCfugaccsgsg (SEQ ID NO: 144).

[0606] 52. A double-stranded ribonucleic acid (dsRNA) for inhibiting expression of LECT2, wherein said dsRNA comprises a sense strand and an antisense strand, the antisense strand comprising a region of complementarity to a LECT2 RNA transcript, wherein the region of complementarity is substantially complementary to nucleotides 669-691 of SEQ ID NO: 1.

[0607] 53. A cell containing the dsRNA of any of the preceding embodiments.

[0608] 54. A human cell comprising a reduced level of LECT2 mRNA or a level of LECT2 protein as compared to an otherwise similar untreated cell, wherein optionally the level is reduced by at least 10%, 15%, 20%, 25%, 30%, 35%, 40%, 45%, 50%, 55%, 60%, 65%, 70%, 75%, 80%, 85%, 90%, or 95%.

[0609] 55. The human cell of embodiment 30a, which was produced by a process comprising contacting the human cell with the dsRNA agent of any one of embodiments 1-52.

[0610] 56. A pharmaceutical composition for inhibiting expression of a LECT2 gene, the composition comprising the dsRNA of any of embodiments 1-52.

[0611] 57. The pharmaceutical composition of embodiment 56, wherein dsRNA is administered in an unbuffered solution.

[0612] 58. The pharmaceutical composition of embodiment 57, wherein said unbuffered solution is saline or water.

[0613] 59. The pharmaceutical composition of embodiment 56, wherein said dsRNA is administered with a buffer solution.

[0614] 60. The pharmaceutical composition of embodiment 59, wherein said buffer solution comprises acetate, citrate, prolamine, carbonate, phosphate or any combination thereof.

[0615] 61. The pharmaceutical composition of embodiment 59 or 60, wherein said buffer solution is phosphate buffered saline (PBS).

[0616] 62. The pharmaceutical composition of any of embodiments 56-61, wherein said composition comprises a lipid formulation.

[0617] 63. The pharmaceutical composition of embodiment 62, wherein the lipid formulation is an LNP formulation.

[0618] 64. The pharmaceutical composition of embodiment 62 or 63, wherein the lipid formulation is an LNP11 formulation.

[0619] 65. The pharmaceutical composition of any of embodiments 56-64, wherein the dsRNA is targeted to a liver cell or a hepatocyte.

[0620] 66. The pharmaceutical composition of any of embodiments 56-65, wherein said composition is administered intravenously.

[0621] 67. The pharmaceutical composition of any of embodiments 56-65, wherein said composition is administered subcutaneously.

[0622] 68. The pharmaceutical composition of embodiment 66, wherein said composition comprises a lipid formulation and is administered intravenously.

[0623] 69. The pharmaceutical composition of any of embodiments 56-68, wherein said composition comprises a dsRNA that is conjugated to a ligand chosen from a carbohydrate ligand or a GalNAc ligand.

[0624] 70. A method of inhibiting LECT2 expression in a cell, the method comprising:
[0625] (a) contacting, e.g., introducing into the cell the dsRNA of any of embodiments 1-52, and
[0626] (b) maintaining the cell of step (a) for a time sufficient to obtain degradation of the mRNA transcript of a LECT2 gene, thereby inhibiting expression of the LECT2 gene in the cell.

[0627] 71. A method of inhibiting LECT2 expression in a cell, the method comprising:
[0628] (a) contacting, e.g., introducing into the cell the dsRNA of any of embodiments 1-52, and
[0629] (b) maintaining the cell of step (a) for a time sufficient to reduce levels of the LECT2 mRNA, LECT2 protein, or both of LECT2 mRNA or LECT2 protein, thereby inhibiting expression of the LECT2 gene in the cell.

[0630] 72. The method of embodiment 70 or 71, wherein the cell is treated ex vivo, in vitro, or in vivo.

[0631] 73. The method of any of embodiments 70-72, wherein the cell is present in a subject in need of treatment, prevention and/or management of a disorder related to LECT2 expression.

[0632] 74. The method of embodiment 73, wherein the subject is a human.

[0633] 75. The method of embodiment 73, wherein said disorder is amyloidosis.

[0634] 76. The method of embodiment 75, wherein the amyloidosis is a LECT2 amyloidosis.

[0635] 77. The method of any of embodiments 70-76, wherein the cell is a liver cell or a hepatocyte.

[0636] 78. The method of any of embodiments 70-77, wherein the expression of LECT2 is inhibited by at least 20%.

[0637] 79. The method of any of embodiments 70-78, wherein the expression of LECT2 mRNA and/or LECT protein is inhibited by at least 50%.

[0638] 80. The method of any of embodiments 70-79, wherein the expression of LECT2 is inhibited by at least 90%.

[0639] 81. The method of embodiments 70-80, wherein inhibiting expression of LECT2 gene decreases a LECT2 protein level in a biological sample (e.g., a serum sample) from the subject by at least 30%, 40%, 50%, 60%, 70%, 80%, 90%, or 95%.

[0640] 82. A method of treating a disorder related to LECT2 expression, comprising administering to a subject in need of such treatment a therapeutically effective amount of
[0641] (i) the dsRNA of any of embodiments 1-52 or
[0642] (ii) the pharmaceutical composition of any of embodiments 56-59.

[0643] 83. A method of treating LECT2 amyloidosis, comprising administering to a subject in need of such treatment a therapeutically effective amount of
[0644] (i) the dsRNA of any of embodiments 1-52 or
[0645] (ii) the pharmaceutical composition of any of embodiments 56-59.

[0646] 84. The method of embodiment 82 or 83, wherein the subject has amyloidosis or is at risk for developing amyloidosis.

[0647] 85. The method of any of embodiments 82-84, wherein the amyloidosis is a LECT2 amyloidosis.

[0648] 86. The method of any one of embodiments 82-85, wherein treating comprises amelioration of at least one sign or symptom of the disorder (e.g., wherein the disorder is amyloidosis (e.g., LECT2 amyloidosis).

[0649] 87. The method of embodiment 86, wherein at least one sign or symptom of an amyloidosis, e.g., LECT2 amyloidosis comprises a measure of amyloid deposits or presence or level of LECT2 (e.g., LECT2 gene, LECT2 mRNA, or LECT2 protein)).

[0650] 88. The method of any of embodiments 82-87, where treating comprises prevention of progression of the disorder.

[0651] 89. The method of any of embodiments 82-88 the treating comprises inhibiting or reducing the expression or activity of LECT2 in a cell, e.g. a hepatocyte.

[0652] 90. The method of embodiment 89, wherein the treating results in at least a 30% mean reduction from baseline of LECT2 mRNA in the cell.

[0653] 91. The method of embodiment 89, wherein the treating results in at least a 60% mean reduction from baseline of LECT2 mRNA in the cell.

[0654] 92. The method of embodiment 89, wherein the treating results in at least a 90% mean reduction from baseline of LECT2 mRNA in the cell.

[0655] 93. The method of any of embodiments 82-92, wherein the subject is a human.

[0656] 94. The method of any of embodiments 73-93, wherein the dsRNA is administered to the subject subcutaneously or intravenously.

[0657] 95. The method of any of embodiments 70-94, wherein the dsRNA or composition comprising the dsRNA is administered according to a dosing regimen.

[0658] 96. The method of embodiment 95, wherein the dosing regimen is weekly, biweekly, or monthly.

[0659] 97. The method of any of embodiments 70-96, wherein the method reduces LECT2 amyloid deposition.

[0660] 98. The method of any one of embodiments 73-97, further comprising measuring level of LECT2 (e.g., LECT2 gene, LECT2 mRNA, or LECT2 protein) in the subject.

[0661] 99. The method of embodiment 98, where measuring the level of LECT2 in the subject comprises measuring the level of LECT2 gene, LECT2 protein or LECT2 mRNA in a biological sample from the subject (e.g., a tissue, blood, or serum sample).

[0662] 100. The method of any one of embodiments 73-99, further comprising performing a blood test, an imaging test, or a liver or kidney biopsy.

[0663] 101. The method of any one of embodiments 98-100, wherein measuring level of LECT2 (e.g., LECT2 gene, LECT2 mRNA, or LECT2 protein) in the subject is performed prior to treatment with the dsRNA agent or the pharmaceutical composition.

[0664] 102. The method of embodiment 101, wherein, upon determination that a subject has a level of LECT2 (e.g., LECT2 gene, LECT2 mRNA, or LECT2 protein) that is greater than a reference level, the dsRNA agent or the pharmaceutical composition is administered to the subject.

[0665] 103. The method of any one of embodiments 98-102, wherein measuring the level of LECT2 (e.g., LECT2 gene, LECT2 mRNA, or LECT2 protein) in the subject is performed after treatment with the dsRNA agent or the pharmaceutical composition.

[0666] 104. A method of reducing LECT2 amyloid deposition in a subject having a LECT2 amyloidosis, the method comprising administering to the subject
[0667] (i) the dsRNA of any of embodiments 1-52 or
[0668] (ii) the pharmaceutical composition of any of embodiments 56-49.

[0669] 105. The method of any of embodiments 82-104, wherein the dsRNA is administered at a dose of 0.05-50 mg/kg.

[0670] 106. The method of any of embodiments 82-105, wherein the dsRNA is administered at a concentration of 0.01 mg/kg to 5 mg/kg bodyweight of the subject.

[0671] 107. The method of any of embodiments 82-106, wherein the dsRNA is formulated as an LNP formulation and is administered at a dose of 0.1 mg/kg to 0.5 mg/kg.

[0672] 108. The method of any of embodiments 82-107, wherein the dsRNA is conjugated to a GalNAc ligand.

[0673] 109. The method of any of embodiments 82-108, wherein the dsRNA is conjugated to a GalNAc ligand and is administered at a dose of 1 mg/kg to 10 mg/kg, optionally at a dose of 1 mg/kg or 3 mg/kg.

[0674] 110. A vector encoding at least one strand of the dsRNA of any of embodiments 1-52.

[0675] 111. A cell comprising the vector of embodiment 110.

### EXAMPLES

### Example 1. LECT2 siRNA

[0676] Nucleic acid sequences provided herein are represented using standard nomenclature. See the abbreviations of Table 1.

TABLE 1
Abbreviations of nucleotide monomers used in nucleic acid sequence representation
It will be understood that these monomers, when present in an oligonucleotide, are mutually linked by 5′-3′-phosphodiester bonds.

| Abbreviation | Nucleotide(s) |
|---|---|
| A | Adenosine-3′-phosphate |
| Ab | beta-L-adenosine-3′-phosphate |
| Abs | beta-L-adenosine-3′-phosphorothioate |
| Af | 2′-fluoroadenosine-3′-phosphate |
| Afs | 2′-fluoroadenosine-3′-phosphorothioate |
| As | adenosine-3′-phosphorothioate |
| C | cytidine-3′-phosphate |
| Cb | beta-L-cytidine-3′-phosphate |
| Cbs | beta-L-cytidine-3′-phosphorothioate |
| Cf | 2′-fluorocytidine-3′-phosphate |
| Cfs | 2′-fluorocytidine-3′-phosphorothioate |
| (Chd) | 2′-O-hexadecyl-cytidine-3′-phosphate |
| (Chds) | 2′-O-hexadecyl-cytidine-3′-phosphorothioate |
| Cs | cytidine-3′-phosphorothioate |
| G | guanosine-3′-phosphate |
| Gb | beta-L-guanosine-3′-phosphate |
| Gbs | beta-L-guanosine-3′-phosphorothioate |
| Gf | 2′-fluoroguanosine-3′-phosphate |
| Gfs | 2′-fluoroguanosine-3′-phosphorothioate |
| Gs | guanosine-3′-phosphorothioate |
| T | 5′-methyluridine-3′-phosphate |
| Tb | beta-L-thymidine-3′-phosphate |
| Tbs | beta-L-thymidine-3′-phosphorothioate |
| Tf | 2′-fluoro-5-methyluridine-3′-phosphate |
| Tfs | 2′-fluoro-5-methyluridine-3′-phosphorothioate |
| Tgn | thymidine-glycol nucleic acid (GNA) S-Isomer |
| Agn | adenosine-glycol nucleic acid (GNA) S-Isomer |
| Cgn | cytidine-glycol nucleic acid (GNA) S-Isomer |
| Ggn | guanosine-glycol nucleic acid (GNA) S-Isomer |
| Ts | 5-methyluridine-3′-phosphorothioate |
| U | Uridine-3′-phosphate |
| Ub | beta-L-uridine-3′-phosphate |
| Ubs | beta-L-uridine-3′-phosphorothioate |
| Uf | 2′-fluorouridine-3′-phosphate |
| Ufs | 2′ -fluorouridine -3′-phosphorothioate |
| (Uhd) | 2′-O-hexadecyl-uridine-3′-phosphate |
| (Uhds) | 2′-O-hexadecyl-uridine-3′-phosphorothioate |
| Us | uridine -3′-phosphorothioate |
| N | any nucleotide (G, A, C, T or U) |
| a | 2′-O-methyladenosine-3′-phosphate |
| as | 2′-O-methyladenosine-3′-phosphorothioate |
| C | 2′-O-methylcytidine-3′-phosphate |
| CS | 2′-O-methylcytidine-3′-phosphorothioate |
| g | 2′-O-methylguanosine-3′-phosphate |
| gs | 2′-O-methylguanosine-3′-phosphorothioate |
| t | 2′-O-methyl-5-methyluridine-3′-phosphate |
| ts | 2′-O-methyl-5-methyluridine-3′-phosphorothioate |
| u | 2′-O-methyluridine-3′-phosphate |
| us | 2′-O-methyluridine-3′-phosphorothioate |
| dA | 2′-deoxyadenosine-3′-phosphate |
| dAs | 2′-deoxyadenosine-3′-phosphorothioate |
| dC | 2′-deoxycytidine-3′-phosphate |
| dCs | 2′-deoxycytidine-3′-phosphorothioate |
| dG | 2′-deoxyguanosine-3′-phosphate |
| dGs | 2′ -deoxyguanosine-3′-phosphorothioate |
| dT | 2′ -deoxythymidine |
| dTs | 2′-deoxythymidine-3′-phosphorothioate |
| dU | 2′ -deoxyuridine |
| S | phosphorothioate linkage |
| L96¹ | N-[tris(GalNAc-alkyl)-amidodecanoyl)]-4-hydroxyprolinol Hyp- |
| | (GalNAc-alkyl)3 |
| Y34 | 2-hydroxymethyl-tetrahydrofurane-4-methoxy-3-phosphate (abasic 2′- |
| | OMe furanose) |
| (Aeo) | 2′-O-methoxyethyladenosine-3′-phosphate |
| (Aeos) | 2′-O-methoxyethyladenosine-3′-phosphorothioate |
| (Geo) | 2′-O-methoxyethylguanosine-3′-phosphate |
| (Geos) | 2′-O-methoxyethylguanosine-3′-phosphorothioate |
| (Teo) | 2′-O-methoxyethyl-5-methyluridine-3′-phosphate |
| (Teos) | 2′-O-methoxyethyl-5-methyluridine-3′-phosphorothioate |
| (m5Ceo) | 2′-O-methoxyethyl-5-methylcytidine-3′-phosphate |
| (m5Ceos) | 2′-O-methoxyethyl-5-methylcytidine-3′-phosphorothioate |
| (A3m) | 3′-O-methyladenosine-2′-phosphate |
| (A3mx) | 3′-O-methyl-xylofuranosyladenosine-2′-phosphate |
| (G3m) | 3′-O-methylguanosine-2′-phosphate |
| (G3mx) | 3′-O-methyl-xylofuranosylguanosine-2′-phosphate |
| (C3m) | 3′-O-methylcytidine-2′-phosphate |
| (C3mx) | 3′-O-methyl-xylofuranosylcytidine-2′-phosphate |
| (U3m) | 3′-O-methyluridine-2′-phosphate |
| (U3mx) | 3′-O-methyl-xylofuranosyluridine-2′-phosphate |

¹The chemical structure of L96 is as follows:

[chemical structure]

### Experimental Methods

### Bioinformatics

### Transcripts

[0677] A set of siRNAs targeting the human LECT2, “leukocyte cell derived chemotaxin 2” (human: NCBI refseqID NM_002302.2; NCBI GeneID: 3950), as well as toxicology-species LECT2 orthologs (cynomolgus monkey: XM_005557840; mouse: NM_010702; rat: NM_001108405) were designed using custom R and Python scripts. The human NM_002302REFSEQ mRNA, version 2, has a length of 1077 bases. The rationale and method for the set of siRNA designs is as follows: the predicted efficacy for every potential 19mer siRNA from position 10 through position 1077 was determined with a linear model derived the direct measure of mRNA knockdown from more than 20,000 distinct siRNA designs targeting a large number of vertebrate genes. Subsets of the LECT2 siRNAs were designed with perfect or near-perfect matches between human and cynomolgus monkey. A further subset was designed with perfect or near-perfect matches to human, cynomolgus monkey and mouse LECT2 orthologs. A further subset was designed with perfect or near-perfect matches to human, cynomolgus monkey, mouse and rat LECT2 orthologs. For each strand of the siRNA, a custom Python script was used in a brute force search to measure the number and positions of mismatches between the siRNA and all potential alignments in the target species transcriptome. Extra weight was given to mismatches in the seed region, defined in this example as positions 2-9 of the antisense oligonucleotide, as well the cleavage site of the siRNA, defined here as positions 10-11 of the antisense oligonucleotide. The relative weight of the mismatches was 2.8; 1.2:1 for seed mismatches, cleavage site, and other positions up through antisense position 19. Mismatches in the first position were ignored. A specificity score was calculated for each strand by summing the value of each weighted mismatch. Preference was given to siRNAs whose antisense score in human was >=2.2 and predicted efficacy was >=50% knockdown of the LECT2 transcript. Pairs of exemplary oligos are evidenced in Table 2A and Table 2B (one set), as well as Table 3A and Table 3B (another set). Modified sequences for each set are presented in Table 2A and Table 3A, respectively. Unmodified sequences for each set are presented in Tables 2B and Table 3B, respectively.

TABLE 2A
Human LECT2 siRNA Modified Single Strands and Duplex Sequences

| | | | Seq ID | | Seq ID NO: | |
|---|---|---|---|---|---|---|
| | Seq ID | | NO: | | (target | |
| Duplex | NO: | | (anti- | | sequence of | |
| Name | (sense) | Sense sequence | sense) | Antisense sequence | NM_002302.2) | Target Sequence |
| AD- | 2 | csasugugCfaCfAfUfugaaaacuguL96 | 3 | asCfsaguu(Tgn)ucaaugUfgCfacaugscsg | 4 | CGCATGTGCACATTGAAAACTGT |
| 133457.6 | | | | | | |
| AD- | 5 | csasugugCfaCfAfUfugaaaacuguL96 | 6 | asCfsaguu(Tgn)ucaaugUfgCfacaugsgsg | 7 | CCCATGTGCACATTGAAAACTGT |
| 454742.1 | | | | | | |
| AD- | 8 | csasugugCfaCfAfUfugaaaacuguL96 | 9 | asCfsaguu(Tgn)ucaaugUfgCfacaugsgsu | 10 | ACCATGTGCACATTGAAAACTGT |
| 454743.1 | | | | | | |
| AD- | 11 | usgsugCfaCfAfUfugaaaacuguL96 | 12 | asCfsaguu(Tgn)ucaaugUfgCfacasusg | 13 | CATGTGCACATTGAAAACTGT |
| 454744.1 | | | | | | |
| AD- | 14 | csasugugCfaCfAfUfugaaaacuguL96 | 15 | asCfsaguu(Tgn)ucaaUfgUfgCfacaugscsg | 16 | CGCATGTGCACATTGAAAACTGT |
| 397297.2 | | | | | | |
| AD- | 17 | csasugugCfaCfAfUfugaaaacuguL96 | 18 | asCfsaGfuu(Tgn)ucaaUfgUfgCfacaugscsg | 19 | CGCATGTGCACATTGAAAACTGT |
| 454745.1 | | | | | | |
| AD- | 20 | csasugugCfaCfAfUfugaaaacuguL96 | 21 | asCfsaguu(Tgn)UfCfaaugUfgCfacaugscsg | 22 | CGCATGTGCACATTGAAAACTGT |
| 397294.2 | | | | | | |
| AD- | 23 | csasugugCfaCfAfUfugaaaacuguL96 | 24 | asCfsaGfuu(Tgn)UfCfaaUfgUfgCfacaugscsg | 25 | CGCATGTGCACATTGAAAACTGT |
| 454746.1 | | | | | | |
| AD- | 26 | csasugugCfaCfAfUfugaaaacuguL96 | 27 | asCfsaGfuu(Tgn)UfcaaUfgUfgCfacaugscsg | 28 | CGCATGTGCACATTGAAAACTGT |
| 454747.1 | | | | | | |
| AD- | 29 | asusggucAfgAfUfCfuucaaaauaaL96 | 30 | usUfsauuu(Tgn)gaagauCfuGfaccaususg | 31 | CAATGGTCAGATCTTCAAAATAA |
| 133461.7 | | | | | | |
| AD- | 32 | asusggucAfgAfUfCfuucaaaauaaL96 | 33 | usUfsauuu(Tgn)gaagauCfuGfaccausgsg | 34 | CCATGGTCAGATCTTCAAAATAA |
| 454748.1 | | | | | | |
| AD- | 35 | asusggucAfgAfUfCfuucaaaauaaL96 | 36 | usUfsauuu(Tgn)gaagauCfuGfaccausgsu | 37 | ACATGGTCAGATCTTCAAAATAA |
| 454749.1 | | | | | | |
| AD- | 38 | gsgsucAfgAfUfCfuucaaaauaaL96 | 39 | usUfsauuu(Tgn)gaagauCfuGfaccsasu | 40 | ATGGTCAGATCTTCAAAATAA |
| 454750.1 | | | | | | |
| AD- | 41 | asusggucAfgAfUfCfuucaaaauaaL96 | 42 | usUfsauuu(Tgn)gaagAfuCfuGfaccaususg | 43 | CAATGGTCAGATCTTCAAAATAA |
| 397303.2 | | | | | | |
| AD- | 44 | asusggucAfgAfUfCfuucaaaauaaL96 | 45 | usUfsaUfuu(Tgn)gaagAfuCfuGfaccaususg | 46 | CAATGGTCAGATCTTCAAAATAA |
| 454751.1 | | | | | | |
| AD- | 47 | asusggucAfgAfUfCfuucaaaauaaL96 | 48 | usUfsauuu(Tgn)GfAfagauCfuGfaccaususg | 49 | CAATGGTCAGATCTTCAAAATAA |
| 397300.2 | | | | | | |
| AD- | 50 | asusggucAfgAfUfCfuucaaaauaaL96 | 51 | usUfsaUfuu(Tgn)GfAfagAfuCfuGfaccaususg | 52 | CAATGGTCAGATCTTCAAAATAA |
| 454752.1 | | | | | | |
| AD- | 53 | asusggucAfgAfUfCfuucaaaauaaL96 | 54 | usUfsaUfuu(Tgn)GfaagAfuCfuGfaccaususg | 55 | CAATGGTCAGATCTTCAAAATAA |
| 454753.1 | | | | | | |
| AD- | 56 | asusggucAfgAfUfCfuucaaaauauL96 | 57 | asUfsauuu(Tgn)gaagauCfuGfaccaususg | 58 | CAATGGTCAGATCTTCAAAATAT |
| 397298.1 | | | | | | |
| AD- | 59 | asusggucAfgAfUfCfuucaaaauauL96 | 60 | asUfsauuu(Tgn)gaagauCfuGfaccausgsg | 61 | CCATGGTCAGATCTTCAAAATAT |
| 454754.1 | | | | | | |
| AD- | 62 | asusggucAfgAfUfCfuucaaaauauL96 | 63 | asUfsauuu(Tgn)gaagauCfuGfaccausgsu | 64 | ACATGGTCAGATCTTCAAAATAT |
| 454755.1 | | | | | | |
| AD- | 65 | gsgsucAfgAfUfCfuucaaaauauL96 | 66 | asUfsauuu(Tgn)gaagauCfuGfaccsasu | 67 | ATGGTCAGATCTTCAAAATAT |
| 454756.1 | | | | | | |
| AD- | 68 | asusggucAfgAfUfCfuucaaaauauL96 | 69 | asUfsauuu(Tgn)gaagAfuCfuGfaccaususg | 70 | CAATGGTCAGATCTTCAAAATAT |
| 454757.1 | | | | | | |
| AD- | 71 | asusggucAfgAfUfCfuucaaaauauL96 | 72 | asUfsaUfuu(Tgn)gaagAfuCfuGfaccaususg | 73 | CAATGGTCAGATCTTCAAAATAT |
| 454758.1 | | | | | | |
| AD- | 74 | asusggucAfgAfUfCfuucaaaauauL96 | 75 | asUfsauuu(Tgn)GfAfagauCfuGfaccaususg | 76 | CAATGGTCAGATCTTCAAAATAT |
| 454759.1 | | | | | | |
| AD- | 77 | asusggucAfgAfUfCfuucaaaauauL96 | 78 | asUfsaUfuu(Tgn)GfAfagAfuCfuGfaccaususg | 79 | CAATGGTCAGATCTTCAAAATAT |
| 454760.1 | | | | | | |
| AD- | 80 | asusggucAfgAfUfCfuucaaaauauL96 | 81 | asUfsaUfuu(Tgn)GfaagAfuCfuGfaccaususg | 82 | CAATGGTCAGATCTTCAAAATAT |
| 454761.1 | | | | | | |
| AD- | 83 | gsgsucagAfuCfUfUfcaaaauaaaaL96 | 84 | usUfsuuaUfuUfUfgaagAfuCfugaccsasu | 85 | ATGGTCAGATCTTCAAAATAAAA |
| 81725.10 | | | | | | |
| AD- | 86 | gsgsucagAfuCfUfUfcaaaauaaaaL96 | 87 | usUfsuuaUfuUfUfgaagAfuCfugaccsgsu | 88 | ACGGTCAGATCTTCAAAATAAAA |
| 454762.1 | | | | | | |
| AD- | 89 | gsgsucagAfuCfUfUfcaaaauaaaaL96 | 90 | usUfsuuaUfuUfUfgaagAfuCfugaccscsu | 91 | AGGGTCAGATCTTCAAAATAAAA |
| 454763.1 | | | | | | |
| AD- | 92 | gsgsucagAfuCfUfUfcaaaauaaaaL96 | 93 | usUfsuuaUfuUfUfgaagAfuCfugaccsgsg | 94 | CCGGTCAGATCTTCAAAATAAAA |
| 454764.1 | | | | | | |
| AD- | 95 | uscsagAfuCfUfUfcaaaauaaaaL96 | 96 | usUfsuuaUfuUfUfgaagAfuCfugascsc | 97 | GGTCAGATCTTCAAAATAAAA |
| 454765.1 | | | | | | |
| AD- | 98 | gsgsucagAfuCfUfUfcaaaauaaaaL96 | 99 | usUfsuuaUfuUfUfgaAfgAfuCfugaccsasu | 100 | ATGGTCAGATCTTCAAAATAAAA |
| 454766.1 | | | | | | |
| AD- | 101 | gsgsucagauCfUfUfcaaaauaaaaL96 | 102 | usUfsuuaUfuUfUfgaagAfuCfugaccsasu | 103 | ATGGTCAGATCTTCAAAATAAAA |
| 454767.1 | | | | | | |
| AD- | 104 | gsgsucagAfuCfUfUfcaaaauaaaaL96 | 105 | usUfsuuaUfuuugaagAfuCfugaccsasu | 106 | ATGGTCAGATCTTCAAAATAAAA |
| 454768.1 | | | | | | |
| AD- | 107 | gsgsucagAfuCfUfUfcaaaauaaaaL96 | 108 | usUfsuuaUfuuugaAfgAfuCfugaccsasu | 109 | ATGGTCAGATCTTCAAAATAAAA |
| 454769.1 | | | | | | |
| AD- | 110 | gsgsucagauCfUfUfcaaaauaaaaL96 | 111 | usUfsuuaUfuUfUfgaAfgAfuCfugaccsasu | 112 | ATGGTCAGATCTTCAAAATAAAA |
| 454770.1 | | | | | | |
| AD- | 113 | gsgsucagauCfUfUfcaaaauaaaaL96 | 114 | usUfsuuaUfuuugaAfgAfuCfugaccsasu | 115 | ATGGTCAGATCTTCAAAATAAAA |
| 454771.1 | | | | | | |
| AD- | 116 | gsgsucagaucUfUfcaaaauaaaaL96 | 117 | usUfsuuaUfuUfUfgaAfgAfuCfugaccsasu | 118 | ATGGTCAGATCTTCAAAATAAAA |
| 454772.1 | | | | | | |
| AD- | 119 | gsgsucagaucUfUfcaaaauaaaaL96 | 120 | usUfsuuaUfuuugaAfgAfuCfugaccsasu | 121 | ATGGTCAGATCTTCAAAATAAAA |
| 454773.1 | | | | | | |
| AD- | 122 | gsgsucagAfuCfUfUfcaaaauaaaaL96 | 123 | usUfsuuaUfuuugaAfgAfuCfugaccsgsu | 124 | ACGGTCAGATCTTCAAAATAAAA |
| 454774.1 | | | | | | |
| AD- | 125 | gsgsucagAfuCfUfUfcaaaauaaaaL96 | 126 | usUfsuuaUfuuugaAfgAfuCfugaccscsu | 127 | AGGGTCAGATCTTCAAAATAAAA |
| 454775.1 | | | | | | |
| AD- | 128 | gsgsucagAfuCfUfUfcaaaauaaaaL96 | 129 | usUfsuuaUfuuugaAfgAfuCfugaccsgsg | 130 | CCGGTCAGATCTTCAAAATAAAA |
| 454776.1 | | | | | | |
| AD- | 131 | uscsagAfuCfUfUfcaaaauaaaaL96 | 132 | usUfsuuaUfuuugaAfgAfuCfugascsc | 133 | GGTCAGATCTTCAAAATAAAA |
| 454777.1 | | | | | | |
| AD- | 134 | gsgsucagAfuCfUfUfcaaaauaaauL96 | 135 | asUfsuuaUfuUfUfgaagAfuCfugaccsasu | 136 | ATGGTCAGATCTTCAAAATAAAT |
| 454778.1 | | | | | | |
| AD- | 137 | gsgsucagAfuCfUfUfcaaaauaaauL96 | 138 | asUfsuuaUfuUfUfgaagAfuCfugaccsgsu | 139 | ACGGTCAGATCTTCAAAATAAAT |
| 454779.1 | | | | | | |
| AD- | 140 | gsgsucagAfuCfUfUfcaaaauaaauL96 | 141 | asUfsuuaUfuUfUfgaagAfuCfugaccscsu | 142 | AGGGTCAGATCTTCAAAATAAAT |
| 454780.1 | | | | | | |
| AD- | 143 | gsgsucagAfuCfUfUfcaaaauaaauL96 | 144 | asUfsuuaUfuUfUfgaagAfuCfugaccsgsg | 145 | CCGGTCAGATCTTCAAAATAAAT |
| 454781.1 | | | | | | |
| AD- | 146 | uscsagAfuCfUfUfcaaaauaaauL96 | 147 | asUfsuuaUfuUfUfgaagAfuCfugascsc | 148 | GGTCAGATCTTCAAAATAAAT |
| 454782.1 | | | | | | |
| AD- | 149 | gsgsucagAfuCfUfUfcaaaauaaauL96 | 150 | asUfsuuaUfuUfUfgaAfgAfuCfugaccsasu | 151 | ATGGTCAGATCTTCAAAATAAAT |
| 454783.1 | | | | | | |
| AD- | 152 | gsgsucagauCfUfUfcaaaauaaauL96 | 153 | asUfsuuaUfuUfUfgaagAfuCfugaccsasu | 154 | ATGGTCAGATCTTCAAAATAAAT |
| 454784.1 | | | | | | |
| AD- | 155 | gsgsucagAfuCfUfUfcaaaauaaauL96 | 156 | asUfsuuaUfuuugaagAfuCfugaccsasu | 157 | ATGGTCAGATCTTCAAAATAAAT |
| 454785.1 | | | | | | |
| AD- | 158 | gsgsucagAfuCfUfUfcaaaauaaauL96 | 159 | asUfsuuaUfuuugaAfgAfuCfugaccsasu | 160 | ATGGTCAGATCTTCAAAATAAAT |
| 454786.1 | | | | | | |
| AD- | 161 | gsgsucagauCfUfUfcaaaauaaauL96 | 162 | asUfsuuaUfuUfUfgaAfgAfuCfugaccsasu | 163 | ATGGTCAGATCTTCAAAATAAAT |
| 454787.1 | | | | | | |
| AD- | 164 | gsgsucagauCfUfUfcaaaauaaauL96 | 165 | asUfsuuaUfuuugaAfgAfuCfugaccsasu | 166 | ATGGTCAGATCTTCAAAATAAAT |
| 454788.1 | | | | | | |
| AD- | 167 | gsgsucagaucUfUfcaaaauaaauL96 | 168 | asUfsuuaUfuUfUfgaAfgAfuCfugaccsasu | 169 | ATGGTCAGATCTTCAAAATAAAT |
| 454789.1 | | | | | | |
| AD- | 170 | gsgsucagaucUfUfcaaaauaaauL96 | 171 | asUfsuuaUfuuugaAfgAfuCfugaccsasu | 172 | ATGGTCAGATCTTCAAAATAAAT |
| 454790.1 | | | | | | |
| AD- | 173 | gsgsucagAfuCfUfUfcaaaauaaauL96 | 174 | asUfsuuaUfuuugaAfgAfuCfugaccsgsu | 175 | ACGGTCAGATCTTCAAAATAAAT |
| 454791.1 | | | | | | |
| AD- | 176 | gsgsucagAfuCfUfUfcaaaauaaauL96 | 177 | asUfsuuaUfuuugaAfgAfuCfugaccscsu | 178 | AGGGTCAGATCTTCAAAATAAAT |
| 454792.1 | | | | | | |
| AD- | 179 | gsgsucagAfuCfUfUfcaaaauaaauL96 | 180 | asUfsuuaUfuuugaAfgAfuCfugaccsgsg | 181 | CCGGTCAGATCTTCAAAATAAAT |
| 454793.1 | | | | | | |
| AD- | 182 | uscsagAfuCfUfUfcaaaauaaauL96 | 183 | asUfsuuaUfuuugaAfgAfuCfugascsc | 184 | GGTCAGATCTTCAAAATAAAT |
| 454794.1 | | | | | | |
| AD- | 185 | asasugguCfaGfAfUfcuucaaaauaL96 | 186 | usAfsuuuUfgAfAfgaucUfgAfccauusgsg | 187 | CCAATGGTCAGATCTTCAAAATA |
| 81723.6 | | | | | | |
| AD- | 188 | asasugguCfaGfAfUfcuucaaaauaL96 | 189 | usAfsuuuUfgAfAfgaucUfgAfccauusgsu | 190 | ACAATGGTCAGATCTTCAAAATA |
| 454795.1 | | | | | | |
| AD- | 191 | asasugguCfaGfAfUfcuucaaaauaL96 | 192 | usAfsuuuUfgAfAfgaucUfgAfccauuscsu | 193 | AGAATGGTCAGATCTTCAAAATA |
| 454796.1 | | | | | | |
| AD- | 194 | usgsguCfaGfAfUfcuucaaaauaL96 | 195 | usAfsuuuUfgAfAfgaucUfgAfccasusu | 196 | AATGGTCAGATCTTCAAAATA |
| 454797.1 | | | | | | |
| AD- | 197 | asasugguCfaGfAfUfcuucaaaauaL96 | 198 | usAfsuuuUfgAfAfgaUfcUfgAfccauusgsg | 199 | CCAATGGTCAGATCTTCAAAATA |
| 454798.1 | | | | | | |
| AD- | 200 | asasuggucaGfAfUfcuucaaaauaL96 | 201 | usAfsuuuUfgAfAfgaucUfgAfccauusgsg | 202 | CCAATGGTCAGATCTTCAAAATA |
| 454799.1 | | | | | | |
| AD- | 203 | asasugguCfaGfAfUfcuucaaaauaL96 | 204 | usAfsuuuUfgaagaucUfgAfccauusgsg | 205 | CCAATGGTCAGATCTTCAAAATA |
| 454800.1 | | | | | | |
| AD- | 206 | asasugguCfaGfAfUfcuucaaaauaL96 | 207 | usAfsuuuUfgaagaUfcUfgAfccauusgsg | 208 | CCAATGGTCAGATCTTCAAAATA |
| 454801.1 | | | | | | |
| AD- | 209 | asasuggucaGfAfUfcuucaaaauaL96 | 210 | usAfsuuuUfgAfAfgaUfcUfgAfccauusgsg | 211 | CCAATGGTCAGATCTTCAAAATA |
| 454802.1 | | | | | | |
| AD- | 212 | asasuggucaGfAfUfcuucaaaauaL96 | 213 | usAfsuuuUfgaagaUfcUfgAfccauusgsg | 214 | CCAATGGTCAGATCTTCAAAATA |
| 454803.1 | | | | | | |
| AD- | 215 | asasuggucagAfUfcuucaaaauaL96 | 216 | usAfsuuuUfgAfAfgaUfcUfgAfccauusgsg | 218 | CCAATGGTCAGATCTTCAAAATA |
| 454804.1 | | | | | | |
| AD- | 219 | asasuggucagAfUfcuucaaaauaL96 | 220 | usAfsuuuUfgaagaUfcUfgAfccauusgsg | 221 | CCAATGGTCAGATCTTCAAAATA |
| 454805.1 | | | | | | |
| AD- | 222 | asasugguCfaGfAfUfcuucaaaauaL96 | 223 | usAfsuuuUfgaagaUfcUfgAfccauusgsu | 224 | ACAATGGTCAGATCTTCAAAATA |
| 454806.1 | | | | | | |
| AD- | 225 | asasugguCfaGfAfUfcuucaaaauaL96 | 226 | usAfsuuuUfgaagaUfcUfgAfccauuscsu | 227 | AGAATGGTCAGATCTTCAAAATA |
| 454807.1 | | | | | | |
| AD- | 228 | usgsguCfaGfAfUfcuucaaaauaL96 | 229 | usAfsuuuUfgaagaUfcUfgAfccasusu | 230 | AATGGTCAGATCTTCAAAATA |
| 454808.1 | | | | | | |
| AD- | 231 | asasugguCfaGfAfUfcuucaaaauuL96 | 232 | asAfsuuuUfgAfAfgaucUfgAfccauusgsg | 233 | CCAATGGTCAGATCTTCAAAATT |
| 454809.1 | | | | | | |
| AD- | 234 | asasugguCfaGfAfUfcuucaaaauuL96 | 235 | asAfsuuuUfgAfAfgaucUfgAfccauusgsu | 236 | ACAATGGTCAGATCTTCAAAATT |
| 454810.1 | | | | | | |
| AD- | 237 | asasugguCfaGfAfUfcuucaaaauuL96 | 238 | asAfsuuuUfgAfAfgaucUfgAfccauuscsu | 239 | AGAATGGTCAGATCTTCAAAATT |
| 454811.1 | | | | | | |
| AD- | 240 | usgsguCfaGfAfUfcuucaaaauuL96 | 241 | asAfsuuuUfgAfAfgaucUfgAfccasusu | 242 | AATGGTCAGATCTTCAAAATT |
| 454812.1 | | | | | | |
| AD- | 243 | asasugguCfaGfAfUfcuucaaaauuL96 | 244 | asAfsuuuUfgAfAfgaUfcUfgAfccauusgsg | 245 | CCAATGGTCAGATCTTCAAAATT |
| 454813.1 | | | | | | |
| AD- | 246 | asasuggucaGfAfUfcuucaaaauuL96 | 247 | asAfsuuuUfgAfAfgaucUfgAfccauusgsg | 248 | CCAATGGTCAGATCTTCAAAATT |
| 454814.1 | | | | | | |
| AD- | 249 | asasugguCfaGfAfUfcuucaaaauuL96 | 250 | asAfsuuuUfgaagaucUfgAfccauusgsg | 251 | CCAATGGTCAGATCTTCAAAATT |
| 454815.1 | | | | | | |
| AD- | 252 | asasugguCfaGfAfUfcuucaaaauuL96 | 253 | asAfsuuuUfgaagaUfcUfgAfccauusgsg | 254 | CCAATGGTCAGATCTTCAAAATT |
| 454816.1 | | | | | | |
| AD- | 255 | asasuggucaGfAfUfcuucaaaauuL96 | 256 | asAfsuuuUfgAfAfgaUfcUfgAfccauusgsg | 257 | CCAATGGTCAGATCTTCAAAATT |
| 454817.1 | | | | | | |
| AD- | 258 | asasuggucaGfAfUfcuucaaaauuL96 | 259 | asAfsuuuUfgaagaUfcUfgAfccauusgsg | 260 | CCAATGGTCAGATCTTCAAAATT |
| 454818.1 | | | | | | |
| AD- | 261 | asasuggucagAfUfcuucaaaauuL96 | 262 | asAfsuuuUfgAfAfgaUfcUfgAfccauusgsg | 263 | CCAATGGTCAGATCTTCAAAATT |
| 454819.1 | | | | | | |
| AD- | 264 | asasuggucagAfUfcuucaaaauuL96 | 265 | asAfsuuuUfgaagaUfcUfgAfccauusgsg | 266 | CCAATGGTCAGATCTTCAAAATT |
| 454820.1 | | | | | | |
| AD- | 267 | asasugguCfaGfAfUfcuucaaaauuL96 | 268 | asAfsuuuUfgaagaUfcUfgAfccauusgsu | 269 | ACAATGGTCAGATCTTCAAAATT |
| 454821.1 | | | | | | |
| AD- | 270 | asasugguCfaGfAfUfcuucaaaauuL96 | 271 | asAfsuuuUfgaagaUfcUfgAfccauuscsu | 272 | AGAATGGTCAGATCTTCAAAATT |
| 454822.1 | | | | | | |
| AD- | 273 | usgsguCfaGfAfUfcuucaaaauuL96 | 274 | asAfsuuuUfgaagaUfcUfgAfccasusu | 275 | AATGGTCAGATCTTCAAAATT |
| 454823.1 | | | | | | |

TABLE 2B
Human LECT2 siRNA Unmodified Single Strands and Duplex Sequences

| | | | | Seq | | |
|---|---|---|---|---|---|---|
| | Seq | | mRNA | ID No: | | mRNA |
| | ID No: | | Target | (anti- | | Target |
| Duplex Name | (sense) | Sense Sequence | Range | sense) | Antisense sequence | Range |
| AD-133457.6 | 276 | CAUGUGCACAUUGAAAACUGU | 607-627 | 277 | ACAGUUTUCAAUGUGCACAUGCG | 605-627 |
| AD-454742.1 | 278 | CAUGUGCACAUUGAAAACUGU | 607-627 | 279 | ACAGUUTUCAAUGUGCACAUGGG | 605-627 |
| AD-454743.1 | 280 | CAUGUGCACAUUGAAAACUGU | 607-627 | 281 | ACAGUUTUCAAUGUGCACAUGGU | 605-627 |
| AD-454744.1 | 282 | UGUGCACAUUGAAAACUGU | 609-627 | 283 | ACAGUUTUCAAUGUGCACAUG | 607-627 |
| AD-397297.2 | 284 | CAUGUGCACAUUGAAAACUGU | 607-627 | 285 | ACAGUUTUCAAUGUGCACAUGCG | 605-627 |
| AD-454745.1 | 286 | CAUGUGCACAUUGAAAACUGU | 607-627 | 287 | ACAGUUTUCAAUGUGCACAUGCG | 605-627 |
| AD-397294.2 | 288 | CAUGUGCACAUUGAAAACUGU | 607-627 | 289 | ACAGUUTUCAAUGUGCACAUGCG | 605-627 |
| AD-454746.1 | 290 | CAUGUGCACAUUGAAAACUGU | 607-627 | 291 | ACAGUUTUCAAUGUGCACAUGCG | 605-627 |
| AD-454747.1 | 292 | CAUGUGCACAUUGAAAACUGU | 607-627 | 293 | ACAGUUTUCAAUGUGCACAUGCG | 605-627 |
| AD-133461.7 | 294 | AUGGUCAGAUCUUCAAAAUAA | 669-689 | 295 | UUAUUUTGAAGAUCUGACCAUUG | 667-689 |
| AD-454748.1 | 296 | AUGGUCAGAUCUUCAAAAUAA | 669-689 | 297 | UUAUUUTGAAGAUCUGACCAUGG | 667-689 |
| AD-454749.1 | 298 | AUGGUCAGAUCUUCAAAAUAA | 669-689 | 299 | UUAUUUTGAAGAUCUGACCAUGU | 667-689 |
| AD-454750.1 | 300 | GGUCAGAUCUUCAAAAUAA | 671-689 | 301 | UUAUUUTGAAGAUCUGACCAU | 669-689 |
| AD-397303.2 | 302 | AUGGUCAGAUCUUCAAAAUAA | 669-689 | 303 | UUAUUUTGAAGAUCUGACCAUUG | 667-689 |
| AD-454751.1 | 304 | AUGGUCAGAUCUUCAAAAUAA | 669-689 | 305 | UUAUUUTGAAGAUCUGACCAUUG | 667-689 |
| AD-397300.2 | 306 | AUGGUCAGAUCUUCAAAAUAA | 669-689 | 307 | UUAUUUTGAAGAUCUGACCAUUG | 667-689 |
| AD-454752.1 | 308 | AUGGUCAGAUCUUCAAAAUAA | 669-689 | 309 | UUAUUUTGAAGAUCUGACCAUUG | 667-689 |
| AD-454753.1 | 310 | AUGGUCAGAUCUUCAAAAUAA | 669-689 | 311 | UUAUUUTGAAGAUCUGACCAUUG | 667-689 |
| AD-397298.1 | 312 | AUGGUCAGAUCUUCAAAAUAU | 669-689 | 313 | AUAUUUTGAAGAUCUGACCAUUG | 667-689 |
| AD-454754.1 | 314 | AUGGUCAGAUCUUCAAAAUAU | 669-689 | 315 | AUAUUUTGAAGAUCUGACCAUGG | 667-689 |
| AD-454755.1 | 316 | AUGGUCAGAUCUUCAAAAUAU | 669-689 | 317 | AUAUUUTGAAGAUCUGACCAUGU | 667-689 |
| AD-454756.1 | 318 | GGUCAGAUCUUCAAAAUAU | 671-689 | 319 | AUAUUUTGAAGAUCUGACCAU | 669-689 |
| AD-454757.1 | 320 | AUGGUCAGAUCUUCAAAAUAU | 669-689 | 321 | AUAUUUTGAAGAUCUGACCAUUG | 667-689 |
| AD-454758.1 | 322 | AUGGUCAGAUCUUCAAAAUAU | 669-689 | 323 | AUAUUUTGAAGAUCUGACCAUUG | 667-689 |
| AD-454759.1 | 324 | AUGGUCAGAUCUUCAAAAUAU | 669-689 | 325 | AUAUUUTGAAGAUCUGACCAUUG | 667-689 |
| AD-454760.1 | 326 | AUGGUCAGAUCUUCAAAAUAU | 669-689 | 327 | AUAUUUTGAAGAUCUGACCAUUG | 667-689 |
| AD-454761.1 | 328 | AUGGUCAGAUCUUCAAAAUAU | 669-689 | 329 | AUAUUUTGAAGAUCUGACCAUUG | 667-689 |
| AD-81725.10 | 330 | GGUCAGAUCUUCAAAAUAAAA | 671-691 | 331 | UUUUAUUUUGAAGAUCUGACCAU | 669-691 |
| AD-454762.1 | 332 | GGUCAGAUCUUCAAAAUAAAA | 671-691 | 333 | UUUUAUUUUGAAGAUCUGACCGU | 669-691 |
| AD-454763.1 | 334 | GGUCAGAUCUUCAAAAUAAAA | 671-691 | 335 | UUUUAUUUUGAAGAUCUGACCCU | 669-691 |
| AD-454764.1 | 336 | GGUCAGAUCUUCAAAAUAAAA | 671-691 | 337 | UUUUAUUUUGAAGAUCUGACCGG | 669-691 |
| AD-454765.1 | 338 | UCAGAUCUUCAAAAUAAAA | 673-691 | 339 | UUUUAUUUUGAAGAUCUGACC | 671-691 |
| AD-454766.1 | 340 | GGUCAGAUCUUCAAAAUAAAA | 671-691 | 341 | UUUUAUUUUGAAGAUCUGACCAU | 669-691 |
| AD-454767.1 | 342 | GGUCAGAUCUUCAAAAUAAAA | 671-691 | 343 | UUUUAUUUUGAAGAUCUGACCAU | 669-691 |
| AD-454768.1 | 344 | GGUCAGAUCUUCAAAAUAAAA | 671-691 | 345 | UUUUAUUUUGAAGAUCUGACCAU | 669-691 |
| AD-454769.1 | 346 | GGUCAGAUCUUCAAAAUAAAA | 671-691 | 347 | UUUUAUUUUGAAGAUCUGACCAU | 669-691 |
| AD-454770.1 | 348 | GGUCAGAUCUUCAAAAUAAAA | 671-691 | 349 | UUUUAUUUUGAAGAUCUGACCAU | 669-691 |
| AD-454771.1 | 350 | GGUCAGAUCUUCAAAAUAAAA | 671-691 | 351 | UUUUAUUUUGAAGAUCUGACCAU | 669-691 |
| AD-454772.1 | 352 | GGUCAGAUCUUCAAAAUAAAA | 671-691 | 353 | UUUUAUUUUGAAGAUCUGACCAU | 669-691 |
| AD-454773.1 | 354 | GGUCAGAUCUUCAAAAUAAAA | 671-691 | 355 | UUUUAUUUUGAAGAUCUGACCAU | 669-691 |
| AD-454774.1 | 356 | GGUCAGAUCUUCAAAAUAAAA | 671-691 | 357 | UUUUAUUUUGAAGAUCUGACCGU | 669-691 |
| AD-454775.1 | 358 | GGUCAGAUCUUCAAAAUAAAA | 671-691 | 359 | UUUUAUUUUGAAGAUCUGACCCU | 669-691 |
| AD-454776.1 | 360 | GGUCAGAUCUUCAAAAUAAAA | 671-691 | 361 | UUUUAUUUUGAAGAUCUGACCGG | 669-691 |
| AD-454777.1 | 362 | UCAGAUCUUCAAAAUAAAA | 673-691 | 363 | UUUUAUUUUGAAGAUCUGACC | 671-691 |
| AD-454778.1 | 364 | GGUCAGAUCUUCAAAAUAAAU | 671-691 | 365 | AUUUAUUUUGAAGAUCUGACCAU | 669-691 |
| AD-454779.1 | 366 | GGUCAGAUCUUCAAAAUAAAU | 671-691 | 367 | AUUUAUUUUGAAGAUCUGACCGU | 669-691 |
| AD-454780.1 | 368 | GGUCAGAUCUUCAAAAUAAAU | 671-691 | 369 | AUUUAUUUUGAAGAUCUGACCCU | 669-691 |
| AD-454781.1 | 370 | GGUCAGAUCUUCAAAAUAAAU | 671-691 | 371 | AUUUAUUUUGAAGAUCUGACCGG | 669-691 |
| AD-454782.1 | 372 | UCAGAUCUUCAAAAUAAAU | 673-691 | 373 | AUUUAUUUUGAAGAUCUGACC | 671-691 |
| AD-454783.1 | 374 | GGUCAGAUCUUCAAAAUAAAU | 671-691 | 375 | AUUUAUUUUGAAGAUCUGACCAU | 669-691 |
| AD-454784.1 | 376 | GGUCAGAUCUUCAAAAUAAAU | 671-691 | 377 | AUUUAUUUUGAAGAUCUGACCAU | 669-691 |
| AD-454785.1 | 378 | GGUCAGAUCUUCAAAAUAAAU | 671-691 | 379 | AUUUAUUUUGAAGAUCUGACCAU | 669-691 |
| AD-454786.1 | 380 | GGUCAGAUCUUCAAAAUAAAU | 671-691 | 381 | AUUUAUUUUGAAGAUCUGACCAU | 669-691 |
| AD-454787.1 | 382 | GGUCAGAUCUUCAAAAUAAAU | 671-691 | 383 | AUUUAUUUUGAAGAUCUGACCAU | 669-691 |
| AD-454788.1 | 384 | GGUCAGAUCUUCAAAAUAAAU | 671-691 | 385 | AUUUAUUUUGAAGAUCUGACCAU | 669-691 |
| AD-454789.1 | 386 | GGUCAGAUCUUCAAAAUAAAU | 671-691 | 387 | AUUUAUUUUGAAGAUCUGACCAU | 669-691 |
| AD-454790.1 | 388 | GGUCAGAUCUUCAAAAUAAAU | 671-691 | 389 | AUUUAUUUUGAAGAUCUGACCAU | 669-691 |
| AD-454791.1 | 390 | GGUCAGAUCUUCAAAAUAAAU | 671-691 | 391 | AUUUAUUUUGAAGAUCUGACCGU | 669-691 |
| AD-454792.1 | 392 | GGUCAGAUCUUCAAAAUAAAU | 671-691 | 393 | AUUUAUUUUGAAGAUCUGACCCU | 669-691 |
| AD-454793.1 | 394 | GGUCAGAUCUUCAAAAUAAAU | 671-691 | 395 | AUUUAUUUUGAAGAUCUGACCGG | 669-691 |
| AD-454794.1 | 396 | UCAGAUCUUCAAAAUAAAU | 673-691 | 397 | AUUUAUUUUGAAGAUCUGACC | 671-691 |
| AD-81723.6 | 398 | AAUGGUCAGAUCUUCAAAAUA | 668-688 | 399 | UAUUUUGAAGAUCUGACCAUUGG | 666-688 |
| AD-454795.1 | 400 | AAUGGUCAGAUCUUCAAAAUA | 668-688 | 401 | UAUUUUGAAGAUCUGACCAUUGU | 666-688 |
| AD-454796.1 | 402 | AAUGGUCAGAUCUUCAAAAUA | 668-688 | 403 | UAUUUUGAAGAUCUGACCAUUCU | 666-688 |
| AD-454797.1 | 404 | UGGUCAGAUCUUCAAAAUA | 670-688 | 405 | UAUUUUGAAGAUCUGACCAUU | 668-688 |
| AD-454798.1 | 406 | AAUGGUCAGAUCUUCAAAAUA | 668-688 | 407 | UAUUUUGAAGAUCUGACCAUUGG | 666-688 |
| AD-454799.1 | 408 | AAUGGUCAGAUCUUCAAAAUA | 668-688 | 409 | UAUUUUGAAGAUCUGACCAUUGG | 666-688 |
| AD-454800.1 | 410 | AAUGGUCAGAUCUUCAAAAUA | 668-688 | 411 | UAUUUUGAAGAUCUGACCAUUGG | 666-688 |
| AD-454801.1 | 412 | AAUGGUCAGAUCUUCAAAAUA | 668-688 | 413 | UAUUUUGAAGAUCUGACCAUUGG | 666-688 |
| AD-454802.1 | 414 | AAUGGUCAGAUCUUCAAAAUA | 668-688 | 415 | UAUUUUGAAGAUCUGACCAUUGG | 666-688 |
| AD-454803.1 | 416 | AAUGGUCAGAUCUUCAAAAUA | 668-688 | 417 | UAUUUUGAAGAUCUGACCAUUGG | 666-688 |
| AD-454804.1 | 418 | AAUGGUCAGAUCUUCAAAAUA | 668-688 | 419 | UAUUUUGAAGAUCUGACCAUUGG | 666-688 |
| AD-454805.1 | 420 | AAUGGUCAGAUCUUCAAAAUA | 668-688 | 421 | UAUUUUGAAGAUCUGACCAUUGG | 666-688 |
| AD-454806.1 | 422 | AAUGGUCAGAUCUUCAAAAUA | 668-688 | 423 | UAUUUUGAAGAUCUGACCAUUGU | 666-688 |
| AD-454807.1 | 424 | AAUGGUCAGAUCUUCAAAAUA | 668-688 | 425 | UAUUUUGAAGAUCUGACCAUUCU | 666-688 |
| AD-454808.1 | 426 | UGGUCAGAUCUUCAAAAUA | 670-688 | 427 | UAUUUUGAAGAUCUGACCAUU | 668-688 |
| AD-454809.1 | 428 | AAUGGUCAGAUCUUCAAAAUU | 668-688 | 429 | AAUUUUGAAGAUCUGACCAUUGG | 666-688 |
| AD-454810.1 | 430 | AAUGGUCAGAUCUUCAAAAUU | 668-688 | 431 | AAUUUUGAAGAUCUGACCAUUGU | 666-688 |
| AD-454811.1 | 432 | AAUGGUCAGAUCUUCAAAAUU | 668-688 | 433 | AAUUUUGAAGAUCUGACCAUUCU | 666-688 |
| AD-454812.1 | 434 | UGGUCAGAUCUUCAAAAUU | 670-688 | 435 | AAUUUUGAAGAUCUGACCAUU | 668-688 |
| AD-454813.1 | 436 | AAUGGUCAGAUCUUCAAAAUU | 668-688 | 437 | AAUUUUGAAGAUCUGACCAUUGG | 666-688 |
| AD-454814.1 | 438 | AAUGGUCAGAUCUUCAAAAUU | 668-688 | 439 | AAUUUUGAAGAUCUGACCAUUGG | 666-688 |
| AD-454815.1 | 440 | AAUGGUCAGAUCUUCAAAAUU | 668-688 | 441 | AAUUUUGAAGAUCUGACCAUUGG | 666-688 |
| AD-454816.1 | 442 | AAUGGUCAGAUCUUCAAAAUU | 668-688 | 443 | AAUUUUGAAGAUCUGACCAUUGG | 666-688 |
| AD-454817.1 | 444 | AAUGGUCAGAUCUUCAAAAUU | 668-688 | 445 | AAUUUUGAAGAUCUGACCAUUGG | 666-688 |
| AD-454818.1 | 446 | AAUGGUCAGAUCUUCAAAAUU | 668-688 | 447 | AAUUUUGAAGAUCUGACCAUUGG | 666-688 |
| AD-454819.1 | 448 | AAUGGUCAGAUCUUCAAAAUU | 668-688 | 449 | AAUUUUGAAGAUCUGACCAUUGG | 666-688 |
| AD-454820.1 | 450 | AAUGGUCAGAUCUUCAAAAUU | 668-688 | 451 | AAUUUUGAAGAUCUGACCAUUGG | 666-688 |
| AD-454821.1 | 452 | AAUGGUCAGAUCUUCAAAAUU | 668-688 | 453 | AAUUUUGAAGAUCUGACCAUUGU | 666-688 |
| AD-454822.1 | 454 | AAUGGUCAGAUCUUCAAAAUU | 668-688 | 455 | AAUUUUGAAGAUCUGACCAUUCU | 666-688 |
| AD-454823.1 | 456 | UGGUCAGAUCUUCAAAAUU | 670-688 | 457 | AAUUUUGAAGAUCUGACCAUU | 668-688 |

TABLE 3A
Human LECT2 siRNA Modified Single Strands and Duplex Sequences

| | | | Seq ID | | Seq ID NO: | |
|---|---|---|---|---|---|---|
| | Seq ID | | No: | | (target | |
| Duplex | No: | | (anti | | sequence of | |
| Name | (sense) | Sense sequence | sense) | Antisense sequence | NM_002302.2) | Target Sequence |
| AD- | 458 | asusggucAfgAfUfCfuu(Chd)aaaauaaL96 | 459 | usUfsauuUfuGfAfagauCfuGfaccaususg | 460 | CAATGGTCAGATCTTCAAAATAA |
| 81680.1 | | | | | | |
| AD- | 461 | ususGfuGfuCfaAfAfAfuGfuUfcUfaCfauL96 | 462 | asUfsgUfaGfaAfcAfuUfuUfgAfcAfcAfasasa | 463 | TTTTGTGTCAAAATGTTCTACAT |
| 81708.1 | | | | | | |
| AD- | 464 | asusggu(Chd)AfgAfUfCfuucaaaauaaL96 | 465 | usUfsauuUfuGfAfagauCfuGfaccaususg | 466 | CAATGGTCAGATCTTCAAAATAA |
| 81679.1 | | | | | | |
| AD- | 467 | ususg(Uhd)GfuCfaAfaAfUfguucuaCfaUfL96 | 468 | asUfsguAfGfaAfcauUfuUfgAfcacaasasa | 469 | TTTTGTGTCAAAATGTTCTACAT |
| 81715.1 | | | | | | |
| AD- | 470 | asusggucAfgAfUfCfuucaaaauaaL96 | 471 | usUfsauuUfuGfAfagauCfuGfaccaususg | 472 | CAATGGTCAGATCTTCAAAATAA |
| 78150.5 | | | | | | |
| AD- | 473 | csasugugCfaCfAfUfugaaaacug(U3m)L96 | 474 | asCfsaguUfuUfCfaaugUfgCfacaugscsg | 475 | CGCATGTGCACATTGAAAACTGT |
| 81696.1 | | | | | | |
| AD- | 476 | asasccagAfuGfUfUfuuccaccaaaL96 | 477 | usUfsuggUfgGfAfaaacAfuCfugguususu | 478 | AAAACCAGATGTTTTCCACCAAA |
| 81728.1 | | | | | | |
| AD- | 479 | asusGfgUfcAfgAfUfCfuUfcAfaAfaUfaaL96 | 480 | usUfsauuUfuGfAfagauCfuGfaccaususg | 481 | CAATGGTCAGATCTTCAAAATAA |
| 81690.2 | | | | | | |
| AD- | 482 | asasugguCfaGfAfUfcuucaaaauaL96 | 483 | usAfsuuuUfgAfAfgaucUfgAfccauusgsg | 484 | CCAATGGTCAGATCTTCAAAATA |
| 81723.1 | | | | | | |
| AD- | 485 | asusGfgUfcAfgAfUfCfuUfcAfaAfaUfaaL96 | 486 | usUfsauuUfuGfAfagauCfuGfaccaususg | 487 | CAATGGTCAGATCTTCAAAATAA |
| 81690.1 | | | | | | |
| AD- | 488 | ususguguCfaAfaAfuguucuacauL96 | 489 | asUfsguaGfaAfCfauUfuUfgAfcacaasasa | 490 | TTTTGTGTCAAAATGTTCTACAT |
| 81707.2 | | | | | | |
| AD- | 491 | ususguguCfaAfaAfuguucuacauL96 | 492 | asUfsguaGfaAfCfauUfuUfgAfcacaasasa | 493 | TTTTGTGTCAAAATGTTCTACAT |
| 81707.1 | | | | | | |
| AD- | 494 | gscsuaggAfaGfUfAfuucauucaaaL96 | 495 | usUfsugaAfuGfAfauacUfuCfcuagcsusa | 496 | TAGCTAGGAAGTATTCATTCAAA |
| 81736.1 | | | | | | |
| AD- | 497 | ususguGfuCfaAfaAfUfg(Uhd)ucuaCfaUfL96 | 498 | asUfsguAfGfaAfcauUfuUfgAfcacaasasa | 499 | TTTTGTGTCAAAATGTTCTACAT |
| 81714.1 | | | | | | |
| AD- | 500 | csasugugCfaCfAfUfugaaaacuguL96 | 501 | asCfsaguUfuUfCfaaugUfgCfacaugscsg | 502 | CGCATGTGCACATTGAAAACTGT |
| 78140.4 | | | | | | |
| AD- | 503 | ususguGfuCfaAfaAfUfguucuaCfaUfL96 | 504 | asUfsguAfGfaAfcauUfuUfgAfcacaAfsasa | 505 | TTTTGTGTCAAAATGTTCTACAT |
| 81721.1 | | | | | | |
| AD- | 506 | usgsgucaGfaUfCfUfucaaaauaaaL96 | 507 | usUfsuauUfuUfGfaagaUfcUfgaccasusu | 508 | AATGGTCAGATCTTCAAAATAAA |
| 81724.1 | | | | | | |
| AD- | 509 | ususguguCfaAfAfAfug(Uhd)ucuacauL96 | 510 | asUfsguaGfaAfCfauuuUfgAfcacaasasa | 511 | TTTTGTGTCAAAATGTTCTACAT |
| 81710.1 | | | | | | |
| AD- | 512 | ususguguCfaAfAfAfuguucuaca(U3m)L96 | 513 | asUfsguaGfaAfCfauuuUfgAfcacaasasa | 514 | TTTTGTGTCAAAATGTTCTACAT |
| 81711.1 | | | | | | |
| AD- | 515 | csasauggUfcAfGfAfucuucaaaauL96 | 516 | asUfsuuuGfaAfGfaucuGfaCfcauugsgsc | 517 | GCCAATGGTCAGATCTTCAAAAT |
| 81722.1 | | | | | | |
| AD- | 518 | ususGfuGfuCfaAfAfAfuGfuUfcUfaCfauL96 | 519 | asUfsgUfaGfaAfcAfuUfuUfgAfcAfcAfasasa | 520 | TTTTGTGTCAAAATGTTCTACAT |
| 81708.2 | | | | | | |
| AD- | 521 | asusggucAfgAfUfCfuucaaaaua(A3m)L96 | 522 | usUfsauuUfuGfAfagauCfuGfaccaususg | 523 | CAATGGTCAGATCTTCAAAATAA |
| 81681.1 | | | | | | |
| AD- | 524 | asusGfgUfcAfgAfUfCfuUfcAfaAfaUfaaL96 | 525 | usUfsaUfuUfuGfaAfgauCfuGfaCfcAfususg | 526 | CAATGGTCAGATCTTCAAAATAA |
| 81678.2 | | | | | | |
| AD- | 527 | gsgsucagAfuCfUfUfcaaaauaaaaL96 | 528 | usUfsuuaUfuUfUfgaagAfuCfugaccsasu | 529 | ATGGTCAGATCTTCAAAATAAAA |
| 81725.1 | | | | | | |
| AD- | 530 | ususGfuGfuCfaAfAfAfuGfuUfcUfaCfauL96 | 531 | asUfsguaGfaAfCfauuuUfgAfcacaasasa | 532 | TTTTGTGTCAAAATGTTCTACAT |
| 81720.1 | | | | | | |
| AD- | 533 | asusGfgUfcAfgAfUfCfuUfcAfaAfaUfaaL96 | 534 | usUfsaUfuUfuGfaAfgauCfuGfaCfcAfususg | 535 | CAATGGTCAGATCTTCAAAATAA |
| 81678.1 | | | | | | |
| AD- | 536 | asusgguCfAfgAfuCfUfucaaaaUfaAfL96 | 537 | usUfsauUfUfuGfaagAfuCfuGfaccaUfsusg | 538 | CAATGGTCAGATCTTCAAAATAA |
| 81691.1 | | | | | | |
| AD- | 539 | ususgug(Uhd)CfaAfAfAfuguucuacauL96 | 540 | asUfsguaGfaAfCfauuuUfgAfcacaasasa | 541 | TTTTGTGTCAAAATGTTCTACAT |
| 81709.1 | | | | | | |
| AD- | 542 | ususguGfuCfaAfaAfUfguucuaCfaY34L96 | 543 | asUfsguAfGfaAfcauUfuUfgAfcacaasasa | 544 | TTTTGTGTCAAAATGTTCTACAT |
| 81713.1 | | | | | | |
| AD- | 545 | ususguGfuCfaAfaAfUfguucuaCfaUfL96 | 546 | asUfsguAfGfaAfcauUfuUfgAfcacaasasa | 547 | TTTTGTGTCAAAATGTTCTACAT |
| 81712.1 | | | | | | |
| AD- | 548 | asusgguCfAfgAfuCfUfucaaaaUfaAfL96 | 549 | usUfsauUfUfuGfaagAfuCfuGfaccaususg | 550 | CAATGGTCAGATCTTCAAAATAA |
| 81682.1 | | | | | | |
| AD- | 551 | csasUfgUfgCfaCfAfUfuGfaAfaAfcUfguL96 | 552 | asCfsaGfuUfuUfcAfaugUfgCfaCfaUfgscsg | 553 | CGCATGTGCACATTGAAAACTGT |
| 81693.1 | | | | | | |
| AD- | 554 | ususGfuGfuCfaAfAfAfuGfuUfcUfaCfauL96 | 555 | asUfsguaGfaAfCfauuuUfgAfcacaasasa | 556 | TTTTGTGTCAAAATGTTCTACAT |
| 81720.2 | | | | | | |
| AD- | 557 | uscsaaacUfuGfAfAfuauucuucaaL96 | 558 | usUfsgaaGfaAfUfauucAfaGfuuugasasu | 559 | ATTCAAACTTGAATATTCTTCAA |
| 81745.1 | | | | | | |
| AD- | 560 | ususguguCfaAfaAfuguucuacauL96 | 561 | asUfsguaga(Agn)cauUfuUfgAfcacaasasa | 562 | TTTTGTGTCAAAATGTTCTACAT |
| 81719.1 | | | | | | |
| AD- | 563 | csasugugCfaCfaUfugaaaacuguL96 | 564 | asCfsaguUfuUfCfaaUfgUfgCfacaugscsg | 565 | CGCATGTGCACATTGAAAACTGT |
| 81692.1 | | | | | | |
| AD- | 566 | csasugugCfaCfaUfugaaaacuguL96 | 567 | asCfsaguUfuUfCfaaUfgUfgCfacaugscsg | 568 | CGCATGTGCACATTGAAAACTGT |
| 81692.2 | | | | | | |
| AD- | 569 | ususcauuCfaAfAfCfuugaauauuaL96 | 570 | usAfsauaUfuCfAfaguuUfgAfaugaasusa | 571 | TATTCATTCAAACTTGAATATTA |
| 81742.1 | | | | | | |
| AD- | 572 | csasUfgUfgCfaCfAfUfuGfaAfaAfcUfguL96 | 573 | asCfsaGfuUfuUfcAfaugUfgCfaCfaUfgscsg | 574 | CGCATGTGCACATTGAAAACTGT |
| 81693.2 | | | | | | |
| AD- | 575 | ususgugucaAfaAfuguucuacauL96 | 576 | asUfsguag(Agn)acauUfuUfgAfcacaasasa | 577 | TTTTGTGTCAAAATGTTCTACAT |
| 81718.1 | | | | | | |
| AD- | 578 | ususguguCfaAfAfAfuguucuacauL96 | 579 | asUfsguaGfaAfCfauuuUfgAfcacaasasa | 580 | TTTTGTGTCAAAATGTTCTACAT |
| 78153.4 | | | | | | |
| AD- | 581 | csasUfgUfgCfaCfAfUfuGfaAfaAfcUfguL96 | 582 | asCfsaguUfuUfCfaaugUfgCfacaugscsg | 583 | CGCATGTGCACATTGAAAACTGT |
| 81705.2 | | | | | | |
| AD- | 584 | usgsugucAfaAfAfUfguucuacauuL96 | 585 | asAfsuguAfgAfAfcauuUfuGfacacasasa | 586 | TTTGTGTCAAAATGTTCTACATT |
| 81727.1 | | | | | | |
| AD- | 587 | csasUfgUfgCfaCfAfUfuGfaAfaAfcUfguL96 | 588 | asCfsaguUfuUfCfaaugUfgCfacaugscsg | 589 | CGCATGTGCACATTGAAAACTGT |
| 81705.1 | | | | | | |
| AD- | 590 | csasug(Uhd)gCfaCfAfUfugaaaacuguL96 | 591 | asCfsaguUfuUfCfaaugUfgCfacaugscsg | 592 | CGCATGTGCACATTGAAAACTGT |
| 81694.1 | | | | | | |
| AD- | 593 | asusgguCfAfgAfuCfUfucaaaaUfaY34L96 | 594 | usUfsauUfUfuGfaagAfuCfuGfaccaususg | 595 | CAATGGTCAGATCTTCAAAATAA |
| 81683.1 | | | | | | |
| AD- | 596 | asusggucAfgAfuCfuucaaaauaaL96 | 597 | usUfsauuUfuGfAfagAfuCfuGfaccaususg | 598 | CAATGGTCAGATCTTCAAAATAA |
| 81677.2 | | | | | | |
| AD- | 599 | ususguguCfaAfaAfuguucuacauL96 | 600 | asUfsgua(Ggn)aacauUfuUfgAfcacaasasa | 601 | TTTTGTGTCAAAATGTTCTACAT |
| 81716.1 | | | | | | |
| AD- | 602 | ususguguCfaAfaAfuguucuacauL96 | 603 | asUfsguag(Agn)acauUfuUfgAfcacaasasa | 604 | TTTTGTGTCAAAATGTTCTACAT |
| 81717.1 | | | | | | |
| AD- | 605 | asgscuagGfaAfGfUfauucauucaaL96 | 606 | usUfsgaaUfgAfAfuacuUfcCfuagcusasu | 607 | ATAGCTAGGAAGTATTCATTCAA |
| 81735.1 | | | | | | |
| AD- | 608 | csasugugCfaCfAfUf(Uhd)gaaaacuguL96 | 609 | asCfsaguUfuUfCfaaugUfgCfacaugscsg | 610 | CGCATGTGCACATTGAAAACTGT |
| 81695.1 | | | | | | |
| AD- | 611 | csasuguGfCfaCfaUfUfgaaaacUfgUfL96 | 612 | asCfsagUfUfuUfcaaUfgUfgCfacauGfscsg | 613 | CGCATGTGCACATTGAAAACTGT |
| 81706.1 | | | | | | |
| AD- | 614 | csusaggaAfgUfAfUfucauucaaaaL96 | 615 | usUfsuugAfaUfGfaauaCfuUfccuagscsu | 616 | AGCTAGGAAGTATTCATTCAAAA |
| 81737.1 | | | | | | |
| AD- | 617 | ususcaaaCfuUfGfAfauauucuucaL96 | 618 | usGfsaagAfaUfAfuucaAfgUfuugaasusg | 619 | CATTCAAACTTGAATATTCTTCA |
| 81744.1 | | | | | | |
| AD- | 620 | asusggucAfgAfuCfuucaaaauaaL96 | 621 | usUfsauuUfuGfAfagAfuCfuGfaccaususg | 622 | CAATGGTCAGATCTTCAAAATAA |
| 81677.1 | | | | | | |
| AD- | 623 | csasuguGfCfaCfaUfUfgaaaacUfgUfL96 | 624 | asCfsagUfUfuUfcaaUfgUfgCfacaugscsg | 625 | CGCATGTGCACATTGAAAACTGT |
| 81697.1 | | | | | | |
| AD- | 626 | asusggucAfgAfuCfuucaaaauaaL96 | 627 | usUfsauu(Tgn)ugaagAfuCfuGfaccaususg | 628 | CAATGGTCAGATCTTCAAAATAA |
| 81686.1 | | | | | | |
| AD- | 629 | asusgguCfAfgAfuCfUf(Uhd)caaaaUfaAfL96 | 630 | usUfsauUfUfuGfaagAfuCfuGfaccaususg | 631 | CAATGGTCAGATCTTCAAAATAA |
| 81684.1 | | | | | | |
| AD- | 632 | asasuagcUfaGfGfAfaguauucauuL96 | 633 | asAfsugaAfuAfCfuuccUfaGfcuauususa | 634 | TAAATAGCTAGGAAGTATTCATT |
| 81732.1 | | | | | | |
| AD- | 635 | asgsuauuCfaUfUfCfaaacuugaauL96 | 636 | asUfsucaAfgUfUfugaaUfgAfauacususc | 637 | GAAGTATTCATTCAAACTTGAAT |
| 81740.1 | | | | | | |
| AD- | 638 | asgsgaagUfaUfUfCfauucaaacuuL96 | 639 | asAfsguuUfgAfAfugaaUfaCfuuccusasg | 640 | CTAGGAAGTATTCATTCAAACTT |
| 81738.1 | | | | | | |
| AD- | 641 | csasuguGfCfaCfaUfUfgaaaacUfgY34L96 | 642 | asCfsagUfUfuUfcaaUfgUfgCfacaugscsg | 643 | CGCATGTGCACATTGAAAACTGT |
| 81698.1 | | | | | | |
| AD- | 644 | csasugugcaCfaUfugaaaacuguL96 | 645 | asCfsaguu(Tgn)ucaaUfgUfgCfacaugscsg | 646 | CGCATGTGCACATTGAAAACTGT |
| 81703.1 | | | | | | |
| AD- | 647 | gsgscuaaAfuAfGfCfuaggaaguauL96 | 648 | asUfsacuUfcCfUfagcuAfuUfuagccsusu | 649 | AAGGCTAAATAGCTAGGAAGTAT |
| 81731.1 | | | | | | |
| AD- | 650 | asasguauUfcAfUfUfcaaacuugaaL96 | 651 | usUfscaaGfuUfUfgaauGfaAfuacuuscsc | 652 | GGAAGTATTCATTCAAACTTGAA |
| 81739.1 | | | | | | |
| AD- | 653 | asasuucuAfaGfGfCfuaaauagcuaL96 | 654 | usAfsgcuAfuUfUfagccUfuAfgaauuscsu | 655 | AGAATTCTAAGGCTAAATAGCTA |
| 81730.1 | | | | | | |
| AD- | 656 | ususgaauAfuUfCfUfucaaagagaaL96 | 657 | usUfscucUfuUfGfaagaAfuAfuucaasgsu | 658 | ACTTGAATATTCTTCAAAGAGAA |
| 81748.1 | | | | | | |
| AD- | 659 | usasgcuaGfgAfAfGfuauucauucaL96 | 660 | usGfsaauGfaAfUfacuuCfcUfagcuasusu | 661 | AATAGCTAGGAAGTATTCATTCA |
| 81734.1 | | | | | | |
| AD- | 662 | asascuugAfaUfAfUfucuucaaagaL96 | 663 | usCfsuuuGfaAfGfaauaUfuCfaaguususg | 664 | CAAACTTGAATATTCTTCAAAGA |
| 81746.1 | | | | | | |
| AD- | 665 | gsasauucUfaAfGfGfcuaaauagcuL96 | 666 | asGfscuaUfuUfAfgccuUfaGfaauucsusg | 667 | CAGAATTCTAAGGCTAAATAGCT |
| 81729.1 | | | | | | |
| AD- | 678 | asusggucagAfuCfuucaaaauaaL96 | 679 | usUfsauuu(Tgn)gaagAfuCfuGfaccaususg | 680 | CAATGGTCAGATCTTCAAAATAA |
| 81688.1 | | | | | | |
| AD- | 681 | asusagcuAfgGfAfAfguauucauuaL96 | 682 | usAfsaugAfaUfAfcuucCfuAfgcuaususu | 683 | AAATAGCTAGGAAGTATTCATTA |
| 81733.1 | | | | | | |
| AD- | 684 | csasugugCfaCfaUfugaaaacuguL96 | 685 | asCfsagu(Tgn)uucaaUfgUfgCfacaugscsg | 686 | CGCATGTGCACATTGAAAACTGT |
| 81701.1 | | | | | | |
| AD- | 687 | csasugugCfaCfaUfugaaaacuguL96 | 688 | asCfsaguuu(Tgn)caaUfgUfgCfacaugscsg | 689 | CGCATGTGCACATTGAAAACTGT |
| 81704.1 | | | | | | |
| AD- | 690 | csasugugCfaCfaUfugaaaacuguL96 | 691 | asCfsaguu(Tgn)ucaaUfgUfgCfacaugscsg | 692 | CGCATGTGCACATTGAAAACTGT |
| 81702.1 | | | | | | |
| AD- | 693 | asusucauUfcAfAfAfcuugaauauuL96 | 694 | asAfsuauUfcAfAfguuuGfaAfugaausasc | 695 | GTATTCATTCAAACTTGAATATT |
| 81741.1 | | | | | | |
| AD- | 696 | ascsuugaAfuAfUfUfcuucaaagaaL96 | 697 | usUfscuuUfgAfAfgaauAfuUfcaagususu | 698 | AAACTTGAATATTCTTCAAAGAA |
| 81747.1 | | | | | | |
| AD- | 699 | asusggucAfgAfuCfuucaaaauaaL96 | 700 | usUfsauuu(Tgn)gaagAfuCfuGfaccaususg | 701 | CAATGGTCAGATCTTCAAAATAA |
| 81687.1 | | | | | | |
| AD- | 702 | asusgugcAfcAfUfUfgaaaacuguaL96 | 703 | usAfscagUfuUfUfcaauGfuGfcacausgsc | 704 | GCATGTGCACATTGAAAACTGTA |
| 81726.1 | | | | | | |
| AD- | 705 | asusggucAfgAfuCfuucaaaauaaL96 | 706 | usUfsauuuu(Ggn)aagAfuCfuGfaccaususg | 707 | CAATGGTCAGATCTTCAAAATAA |
| 81689.1 | | | | | | |
| AD- | 708 | asusgg(Uhd)CfAfgAfuCfUfucaaaaUfaAfL96 | 709 | usUfsauUfUfuGfaagAfuCfuGfaccaususg | 710 | CAATGGTCAGATCTTCAAAATAA |
| 81685.1 | | | | | | |
| AD- | 711 | csasuguGfCfaCfaUf(Uhd)gaaaacUfgUfL96 | 712 | asCfsagUfUfuUfcaaUfgUfgCfacaugscsg | 713 | CGCATGTGCACATTGAAAACTGT |
| 81699.1 | | | | | | |
| AD- | 714 | asusucaaAfcUfUfGfaauauucuuaL96 | 715 | usAfsagaAfuAfUfucaaGfuUfugaausgsa | 716 | TCATTCAAACTTGAATATTCTTA |
| 81743.1 | | | | | | |
| AD- | 717 | csasug(Uhd)GfCfaCfaUfUfgaaaacUfgUfL96 | 718 | asCfsagUfUfuUfcaaUfgUfgCfacaugscsg | 719 | CGCATGTGCACATTGAAAACTGT |
| 81700.1 | | | | | | |

TABLE 3B
Human LECT2 siRNA Unmodified Single Strands and Duplex Sequences

| | Seq ID | | mRNA | Seq ID | | mRNA |
|---|---|---|---|---|---|---|
| Duplex | No: | | Target | No: | | Target |
| Name | (sense) | Sense sequence | Range | (antisense) | Antisense sequence | Range |
| AD-81680.1 | 720 | AUGGUCAGAUCUUCAAAAUAA | 669-690 | 721 | UUAUUUUGAAGAUCUGACCAUUG | 667-689 |
| AD-81708.1 | 722 | UUGUGUCAAAAUGUUCUACAU | 495-516 | 723 | AUGUAGAACAUUUUGACACAAAA | 493-515 |
| AD-81679.1 | 724 | AUGGUCAGAUCUUCAAAAUAA | 669-690 | 725 | UUAUUUUGAAGAUCUGACCAUUG | 667-689 |
| AD-81715.1 | 726 | UUGUGUCAAAAUGUUCUACAU | 495-516 | 727 | AUGUAGAACAUUUUGACACAAAA | 493-515 |
| AD-78150.5 | 728 | AUGGUCAGAUCUUCAAAAUAA | 669-689 | 729 | UUAUUUUGAAGAUCUGACCAUUG | 667-689 |
| AD-81696.1 | 730 | CAUGUGCACAUUGAAAACUGU | 607-628 | 731 | ACAGUUUUCAAUGUGCACAUGCG | 605-627 |
| AD-81728.1 | 732 | AACCAGAUGUUUUCCACCAAA | 196-216 | 733 | UUUGGUGGAAAACAUCUGGUUUU | 194-216 |
| AD-81690.2 | 734 | AUGGUCAGAUCUUCAAAAUAA | 669-690 | 735 | UUAUUUUGAAGAUCUGACCAUUG | 667-689 |
| AD-81723.1 | 736 | AAUGGUCAGAUCUUCAAAAUA | 668-688 | 737 | UAUUUUGAAGAUCUGACCAUUGG | 666-688 |
| AD-81690.1 | 738 | AUGGUCAGAUCUUCAAAAUAA | 669-690 | 739 | UUAUUUUGAAGAUCUGACCAUUG | 667-689 |
| AD-81707.2 | 740 | UUGUGUCAAAAUGUUCUACAU | 495-516 | 741 | AUGUAGAACAUUUUGACACAAAA | 493-515 |
| AD-81707.1 | 742 | UUGUGUCAAAAUGUUCUACAU | 495-516 | 743 | AUGUAGAACAUUUUGACACAAAA | 493-515 |
| AD-81736.1 | 744 | GCUAGGAAGUAUUCAUUCAAA | 110-130 | 745 | UUUGAAUGAAUACUUCCUAGCUA | 108-130 |
| AD-81714.1 | 746 | UUGUGUCAAAAUGUUCUACAU | 495-516 | 747 | AUGUAGAACAUUUUGACACAAAA | 493-515 |
| AD-78140.4 | 748 | CAUGUGCACAUUGAAAACUGU | 607-627 | 749 | ACAGUUUUCAAUGUGCACAUGCG | 605-627 |
| AD-81721.1 | 750 | UUGUGUCAAAAUGUUCUACAU | 495-516 | 751 | AUGUAGAACAUUUUGACACAAAA | 493-515 |
| AD-81724.1 | 752 | UGGUCAGAUCUUCAAAAUAAA | 670-690 | 753 | UUUAUUUUGAAGAUCUGACCAUU | 668-690 |
| AD-81710.1 | 754 | UUGUGUCAAAAUGUUCUACAU | 495-516 | 755 | AUGUAGAACAUUUUGACACAAAA | 493-515 |
| AD-81711.1 | 756 | UUGUGUCAAAAUGUUCUACAU | 495-516 | 757 | AUGUAGAACAUUUUGACACAAAA | 493-515 |
| AD-81722.1 | 758 | CAAUGGUCAGAUCUUCAAAAU | 667-687 | 759 | AUUUUGAAGAUCUGACCAUUGGC | 665-687 |
| AD-81708.2 | 760 | UUGUGUCAAAAUGUUCUACAU | 495-516 | 761 | AUGUAGAACAUUUUGACACAAAA | 493-515 |
| AD-81681.1 | 762 | AUGGUCAGAUCUUCAAAAUAA | 669-690 | 763 | UUAUUUUGAAGAUCUGACCAUUG | 667-689 |
| AD-81678.2 | 764 | AUGGUCAGAUCUUCAAAAUAA | 669-690 | 765 | UUAUUUUGAAGAUCUGACCAUUG | 667-689 |
| AD-81725.1 | 766 | GGUCAGAUCUUCAAAAUAAAA | 671-691 | 767 | UUUUAUUUUGAAGAUCUGACCAU | 669-691 |
| AD-81720.1 | 768 | UUGUGUCAAAAUGUUCUACAU | 495-516 | 769 | AUGUAGAACAUUUUGACACAAAA | 493-515 |
| AD-81678.1 | 770 | AUGGUCAGAUCUUCAAAAUAA | 669-690 | 771 | UUAUUUUGAAGAUCUGACCAUUG | 667-689 |
| AD-81691.1 | 772 | AUGGUCAGAUCUUCAAAAUAA | 669-690 | 773 | UUAUUUUGAAGAUCUGACCAUUG | 667-689 |
| AD-81709.1 | 774 | UUGUGUCAAAAUGUUCUACAU | 495-516 | 775 | AUGUAGAACAUUUUGACACAAAA | 493-515 |
| AD-81713.1 | 776 | UUGUGUCAAAAUGUUCUACA | 495-516 | 777 | AUGUAGAACAUUUUGACACAAAA | 493-515 |
| AD-81712.1 | 778 | UUGUGUCAAAAUGUUCUACAU | 495-516 | 779 | AUGUAGAACAUUUUGACACAAAA | 493-515 |
| AD-81682.1 | 780 | AUGGUCAGAUCUUCAAAAUAA | 669-690 | 781 | UUAUUUUGAAGAUCUGACCAUUG | 667-689 |
| AD-81693.1 | 782 | CAUGUGCACAUUGAAAACUGU | 607-628 | 783 | ACAGUUUUCAAUGUGCACAUGCG | 605-627 |
| AD-81720.2 | 784 | UUGUGUCAAAAUGUUCUACAU | 495-516 | 785 | AUGUAGAACAUUUUGACACAAAA | 493-515 |
| AD-81745.1 | 786 | UCAAACUUGAAUAUUCUUCAA | 126-146 | 787 | UUGAAGAAUAUUCAAGUUUGAAU | 124-146 |
| AD-81719.1 | 788 | UUGUGUCAAAAUGUUCUACAU | 495-516 | 789 | AUGUAGAACAUUUUGACACAAAA | 493-515 |
| AD-81692.1 | 790 | CAUGUGCACAUUGAAAACUGU | 607-628 | 791 | ACAGUUUUCAAUGUGCACAUGCG | 605-627 |
| AD-81692.2 | 792 | CAUGUGCACAUUGAAAACUGU | 607-628 | 793 | ACAGUUUUCAAUGUGCACAUGCG | 605-627 |
| AD-81742.1 | 794 | UUCAUUCAAACUUGAAUAUUA | 121-141 | 795 | UAAUAUUCAAGUUUGAAUGAAUA | 119-141 |
| AD-81693.2 | 796 | CAUGUGCACAUUGAAAACUGU | 607-628 | 797 | ACAGUUUUCAAUGUGCACAUGCG | 605-627 |
| AD-81718.1 | 798 | UUGUGUCAAAAUGUUCUACAU | 495-516 | 799 | AUGUAGAACAUUUUGACACAAAA | 493-515 |
| AD-78153.4 | 800 | UUGUGUCAAAAUGUUCUACAU | 495-516 | 801 | AUGUAGAACAUUUUGACACAAAA | 493-515 |
| AD-81705.2 | 802 | CAUGUGCACAUUGAAAACUGU | 607-628 | 803 | ACAGUUUUCAAUGUGCACAUGCG | 605-627 |
| AD-81727.1 | 804 | UGUGUCAAAAUGUUCUACAUU | 496-516 | 805 | AAUGUAGAACAUUUUGACACAAA | 494-516 |
| AD-81705.1 | 806 | CAUGUGCACAUUGAAAACUGU | 607-628 | 807 | ACAGUUUUCAAUGUGCACAUGCG | 605-627 |
| AD-81694.1 | 808 | CAUGUGCACAUUGAAAACUGU | 607-628 | 809 | ACAGUUUUCAAUGUGCACAUGCG | 605-627 |
| AD-81683.1 | 810 | AUGGUCAGAUCUUCAAAAUA | 669-690 | 811 | UUAUUUUGAAGAUCUGACCAUUG | 667-689 |
| AD-81677.2 | 812 | AUGGUCAGAUCUUCAAAAUAA | 669-690 | 813 | UUAUUUUGAAGAUCUGACCAUUG | 667-689 |
| AD-81716.1 | 814 | UUGUGUCAAAAUGUUCUACAU | 495-516 | 815 | AUGUAGAACAUUUUGACACAAAA | 493-515 |
| AD-81717.1 | 816 | UUGUGUCAAAAUGUUCUACAU | 495-516 | 817 | AUGUAGAACAUUUUGACACAAAA | 493-515 |
| AD-81735.1 | 818 | AGCUAGGAAGUAUUCAUUCAA | 109-129 | 819 | UUGAAUGAAUACUUCCUAGCUAU | 107-129 |
| AD-81695.1 | 820 | CAUGUGCACAUUGAAAACUGU | 607-628 | 821 | ACAGUUUUCAAUGUGCACAUGCG | 605-627 |
| AD-81706.1 | 822 | CAUGUGCACAUUGAAAACUGU | 607-628 | 823 | ACAGUUUUCAAUGUGCACAUGCG | 605-627 |
| AD-81737.1 | 824 | CUAGGAAGUAUUCAUUCAAAA | 111-131 | 825 | UUUUGAAUGAAUACUUCCUAGCU | 109-131 |
| AD-81744.1 | 826 | UUCAAACUUGAAUAUUCUUCA | 125-145 | 827 | UGAAGAAUAUUCAAGUUUGAAUG | 123-145 |
| AD-81677.1 | 828 | AUGGUCAGAUCUUCAAAAUAA | 669-690 | 829 | UUAUUUUGAAGAUCUGACCAUUG | 667-689 |
| AD-81697.1 | 830 | CAUGUGCACAUUGAAAACUGU | 607-628 | 831 | ACAGUUUUCAAUGUGCACAUGCG | 605-627 |
| AD-81686.1 | 832 | AUGGUCAGAUCUUCAAAAUAA | 669-690 | 833 | UUAUUTUGAAGAUCUGACCAUUG | 667-689 |
| AD-81684.1 | 834 | AUGGUCAGAUCUUCAAAAUAA | 669-690 | 835 | UUAUUUUGAAGAUCUGACCAUUG | 667-689 |
| AD-81732.1 | 836 | AAUAGCUAGGAAGUAUUCAUU | 106-126 | 837 | AAUGAAUACUUCCUAGCUAUUUA | 104-126 |
| AD-81740.1 | 838 | AGUAUUCAUUCAAACUUGAAU | 117-137 | 839 | AUUCAAGUUUGAAUGAAUACUUC | 115-137 |
| AD-81738.1 | 840 | AGGAAGUAUUCAUUCAAACUU | 113-133 | 841 | AAGUUUGAAUGAAUACUUCCUAG | 111-133 |
| AD-81698.1 | 842 | CAUGUGCACAUUGAAAACUG | 607-628 | 843 | ACAGUUUUCAAUGUGCACAUGCG | 605-627 |
| AD-81703.1 | 844 | CAUGUGCACAUUGAAAACUGU | 607-628 | 845 | ACAGUUTUCAAUGUGCACAUGCG | 605-627 |
| AD-81731.1 | 846 | GGCUAAAUAGCUAGGAAGUAU | 101-121 | 847 | AUACUUCCUAGCUAUUUAGCCUU | 99-121 |
| AD-81739.1 | 848 | AAGUAUUCAUUCAAACUUGAA | 116-136 | 849 | UUCAAGUUUGAAUGAAUACUUCC | 114-136 |
| AD-81730.1 | 850 | AAUUCUAAGGCUAAAUAGCUA | 93-113 | 851 | UAGCUAUUUAGCCUUAGAAUUCU | 91-113 |
| AD-81748.1 | 852 | UUGAAUAUUCUUCAAAGAGAA | 132-152 | 853 | UUCUCUUUGAAGAAUAUUCAAGU | 130-152 |
| AD-81734.1 | 854 | UAGCUAGGAAGUAUUCAUUCA | 108-128 | 855 | UGAAUGAAUACUUCCUAGCUAUU | 106-128 |
| AD-81746.1 | 856 | AACUUGAAUAUUCUUCAAAGA | 129-149 | 857 | UCUUUGAAGAAUAUUCAAGUUUG | 127-149 |
| AD-81729.1 | 858 | GAAUUCUAAGGCUAAAUAGCU | 92-112 | 859 | AGCUAUUUAGCCUUAGAAUUCUG | 90-112 |
| AD-81688.1 | 860 | AUGGUCAGAUCUUCAAAAUAA | 669-690 | 861 | UUAUUUTGAAGAUCUGACCAUUG | 667-689 |
| AD-81733.1 | 862 | AUAGCUAGGAAGUAUUCAUUA | 107-127 | 863 | UAAUGAAUACUUCCUAGCUAUUU | 105-127 |
| AD-81701.1 | 864 | CAUGUGCACAUUGAAAACUGU | 607-628 | 865 | ACAGUTUUCAAUGUGCACAUGCG | 605-627 |
| AD-81704.1 | 866 | CAUGUGCACAUUGAAAACUGU | 607-628 | 867 | ACAGUUUTCAAUGUGCACAUGCG | 605-627 |
| AD-81702.1 | 868 | CAUGUGCACAUUGAAAACUGU | 607-628 | 869 | ACAGUUTUCAAUGUGCACAUGCG | 605-627 |
| AD-81741.1 | 870 | AUUCAUUCAAACUUGAAUAUU | 120-140 | 871 | AAUAUUCAAGUUUGAAUGAAUAC | 118-140 |
| AD-81747.1 | 872 | ACUUGAAUAUUCUUCAAAGAA | 130-150 | 873 | UUCUUUGAAGAAUAUUCAAGUUU | 128-150 |
| AD-81687.1 | 874 | AUGGUCAGAUCUUCAAAAUAA | 669-690 | 875 | UUAUUUTGAAGAUCUGACCAUUG | 667-689 |
| AD-81726.1 | 876 | AUGUGCACAUUGAAAACUGUA | 608-628 | 877 | UACAGUUUUCAAUGUGCACAUGC | 606-628 |
| AD-81689.1 | 878 | AUGGUCAGAUCUUCAAAAUAA | 669-690 | 879 | UUAUUUUGAAGAUCUGACCAUUG | 667-689 |
| AD-81685.1 | 880 | AUGGUCAGAUCUUCAAAAUAA | 669-690 | 881 | UUAUUUUGAAGAUCUGACCAUUG | 667-689 |
| AD-81699.1 | 882 | CAUGUGCACAUUGAAAACUGU | 607-628 | 883 | ACAGUUUUCAAUGUGCACAUGCG | 605-627 |
| AD-81743.1 | 884 | AUUCAAACUUGAAUAUUCUUA | 124-144 | 885 | UAAGAAUAUUCAAGUUUGAAUGA | 122-144 |
| AD-81700.1 | 886 | CAUGUGCACAUUGAAAACUGU | 607-628 | 887 | ACAGUUUUCAAUGUGCACAUGCG | 605-627 |

### Example 2. In Vitro Screening of LECT2 siRNA

### Experimental Methods

### Cell Culture and Transfections:

[0678] Cynomolgus monkey primary hepatocytes were transfected independently by adding 5 μl of Opti-MEM plus 0.1 μl of Lipofectamine RNAiMax per well (Invitrogen, Carlsbad C A. cat #13778-150) to 5.1 μl of siRNA duplexes per well into a 384-well plate and incubated at room temperature for 15 minutes. 40 μl of InVitroGRO CP Medium (BioIVT Cat #Z99029) containing 5×10³ primary cynomolgus monkey hepatocytes were then added to the siRNA mixture. Cells were incubated for 24 hours prior to RNA purification. Single dose experiments were performed at 10 nM final duplex concentrations.

### RNA Isolation:

[0679] Total RNA was isolated using an automated protocol on a BioTek-EL406 platform using DYNABEADs (Invitrogen, Cat #61012). Briefly, 70 μl of Lysis/Binding Buffer and 10 μl of lysis buffer containing 3 μl of magnetic beads were added to the plate with cells. Plates were incubated on an electromagnetic shaker for 10 minutes at room temperature and then magnetic beads were captured and the supernatant was removed. Bead-bound RNA was then washed 2 times with 150 μl Wash Buffer A and once with Wash Buffer B. Beads were then washed with 150 μl Elution Buffer, re-captured and supernatant removed.

cDNA Synthesis:

[0680] cDNA was synthesized using ABI High capacity cDNA reverse transcription kit (Applied Biosystems, Foster City, CA, Cat #4368813). 12 μl of a master mix containing 1.2 μl 10× Buffer, 0.48 μl 25×dNTPs, 1.2 μl 10×Random primers, 0.6 μl Reverse Transcriptase, 0.6 μl RNase inhibitor and 7.92 μl of H2O per reaction was added to RNA isolated above. Plates were sealed, mixed, and incubated on an electromagnetic shaker for 10 minutes at room temperature, followed by 2 h at 37° C.

### Real Time PCR:

[0681] 2 μl of cDNA were added to a master mix containing 0.5 μl of GAPDH TaqMan Probe (Hs99999905), 0.5 μl LECT2 probe and 5 μl Lightcycler 480 probe master mix (Roche Cat #04887301001) per well in a 384 well plates (Roche cat #04887301001). Cynomolgus monkey primary hepatocytes qPCR was probed with a custom cynomolgus GAPDH probe and a cynomolgus LECT2 probe (Mf02803673_m1). Real time PCR was done in a LightCycler480 Real Time PCR system (Roche) using the ΔΔCt(RQ) assay. Each duplex was tested in two independent transfections and data were normalized to cells transfected with a non-targeting control siRNA. To calculate relative fold change, real time data were analyzed using the ΔΔCt method and normalized to assays performed with cells transfected with 20 nM AD-1955, or mock transfected cells.

### Results

[0682] The results of the single dose screen in primary monkey hepatocytes with two sets of exemplary LECT2 siRNAs are shown in Table 4A (correspond to siRNAs in Table 2A and Table 2B) and Table 4B (correspond to siRNAs in Table 3A and Table 3B). The single dose experiments were performed at 10 nM final duplex concentration and the data are expressed as percent message remaining relative to AD-1955 non-targeting control.

TABLE 4A
Cynomolgus monkey LECT2 endogenous in vitro 10 nM screen
with one set of exemplary LECT2 siRNAs

| | % of Cyno | |
|---|---|---|
| Duplex Name | Message Remaining | STDEV |
| AD-133457.6 | 21.0 | 3.9 |
| AD-454742.1 | 59.0 | 8.3 |
| AD-454743.1 | 51.3 | 5.9 |
| AD-454744.1 | 27.3 | 4.1 |
| AD-397297.2 | 9.2 | 1.4 |
| AD-454745.1 | 10.0 | 2.8 |
| AD-397294.2 | 10.5 | 1.2 |
| AD-454746.1 | 6.7 | 1.0 |
| AD-454747.1 | 10.1 | 1.7 |
| AD-133461.7 | 7.1 | 3.2 |
| AD-454748.1 | 5.1 | 1.6 |
| AD-454749.1 | 7.6 | 2.4 |
| AD-454750.1 | 4.0 | 0.9 |
| AD-397303.2 | 4.0 | 0.2 |
| AD-454751.1 | 4.3 | 1.0 |
| AD-397300.2 | 4.0 | 1.2 |
| AD-454752.1 | 5.2 | 1.1 |
| AD-454753.1 | 8.8 | 1.8 |
| AD-397298.1 | 7.6 | 3.8 |
| AD-454754.1 | 7.6 | 0.5 |
| AD-454755.1 | 5.2 | 0.9 |
| AD-454756.1 | 6.0 | 1.2 |
| AD-454757.1 | 4.5 | 0.5 |
| AD-454758.1 | 4.3 | 1.8 |
| AD-454759.1 | 8.3 | 1.5 |
| AD-454760.1 | 6.2 | 2.2 |
| AD-454761.1 | 6.2 | 2.4 |
| AD-81725.10 | 6.8 | 1.6 |
| AD-454762.1 | 5.8 | 2.3 |
| AD-454763.1 | 6.5 | 2.0 |
| AD-454764.1 | 7.7 | 2.5 |
| AD-454765.1 | 6.0 | 1.3 |
| AD-454766.1 | 7.0 | 1.9 |
| AD-454767.1 | 6.2 | 1.5 |
| AD-454768.1 | 6.0 | 3.3 |
| AD-454769.1 | 5.8 | 1.3 |
| AD-454770.1 | 6.4 | 1.9 |
| AD-454771.1 | 5.6 | 2.0 |
| AD-454772.1 | 6.2 | 1.9 |
| AD-454773.1 | 7.4 | 1.2 |
| AD-454774.1 | 7.4 | 1.0 |
| AD-454775.1 | 7.6 | 2.4 |
| AD-454776.1 | 8.9 | 3.7 |
| AD-454777.1 | 6.3 | 1.4 |
| AD-454778.1 | 6.8 | 2.2 |
| AD-454779.1 | 6.5 | 0.3 |
| AD-454780.1 | 7.1 | 2.1 |
| AD-454781.1 | 5.7 | 1.6 |
| AD-454782.1 | 10.2 | 2.7 |
| AD-454783.1 | 5.6 | 1.2 |
| AD-454784.1 | 9.3 | 5.3 |
| AD-454785.1 | 6.5 | 1.4 |
| AD-454786.1 | 8.0 | 1.7 |
| AD-454787.1 | 6.6 | 1.7 |
| AD-454788.1 | 7.0 | 0.6 |
| AD-454789.1 | 8.8 | 1.6 |
| AD-454790.1 | 6.8 | 2.1 |
| AD-454791.1 | 5.1 | 1.1 |
| AD-454792.1 | 5.2 | 1.3 |
| AD-454793.1 | 6.5 | 1.0 |
| AD-454794.1 | 7.2 | 2.6 |
| AD-81723.6 | 5.3 | 1.4 |
| AD-454795.1 | 3.7 | 0.3 |
| AD-454796.1 | 7.3 | 2.9 |
| AD-454797.1 | 7.1 | 2.0 |
| AD-454798.1 | 5.8 | 0.9 |
| AD-454799.1 | 4.9 | 0.7 |
| AD-454800.1 | 5.0 | 1.8 |
| AD-454801.1 | 3.1 | 0.1 |
| AD-454802.1 | 5.4 | 1.8 |
| AD-454803.1 | 4.6 | 1.9 |
| AD-454804.1 | 60.0 | 11.5 |
| AD-454805.1 | 32.5 | 6.5 |
| AD-454806.1 | 6.6 | 1.5 |
| AD-454807.1 | 7.5 | 0.7 |
| AD-454808.1 | 5.3 | 1.4 |
| AD-454809.1 | 6.3 | 2.3 |
| AD-454810.1 | 5.7 | 1.1 |
| AD-454811.1 | 6.2 | 1.3 |
| AD-454812.1 | 4.5 | 1.7 |
| AD-454813.1 | 4.5 | 1.0 |
| AD-454814.1 | 5.9 | 0.4 |
| AD-454815.1 | 7.5 | 1.4 |
| AD-454816.1 | 6.2 | 2.7 |
| AD-454817.1 | 6.3 | 1.5 |
| AD-454818.1 | 6.1 | 0.8 |
| AD-454819.1 | 58.1 | 15.4 |
| AD-454820.1 | 52.7 | 6.4 |
| AD-454821.1 | 3.9 | 0.8 |
| AD-454822.1 | 4.6 | 0.3 |
| AD-454823.1 | 6.1 | 2.7 |

TABLE 4B
Cynomolgus monkey LECT2 endogenous in vitro 10 nM screen
with another set of exemplary LECT2 siRNAs

| | % of Cyno | |
|---|---|---|
| Duplex Name | Message Remaining | STDEV |
| AD-81680.1 | 0.3 | 0.2 |
| AD-81708.1 | 0.3 | 0.4 |
| AD-81679.1 | 0.4 | 0.3 |
| AD-81715.1 | 0.4 | 0.5 |
| AD-78150.5 | 0.4 | 0.3 |
| AD-81696.1 | 0.4 | 0.5 |
| AD-81728.1 | 0.4 | 0.6 |
| AD-81690.2 | 0.4 | 0.3 |
| AD-81723.1 | 0.5 | 0.3 |
| AD-81690.1 | 0.5 | 0.3 |
| AD-81707.2 | 0.5 | 0.5 |
| AD-81707.1 | 0.5 | 0.5 |
| AD-81736.1 | 0.6 | 0.9 |
| AD-81714.1 | 0.6 | 0.4 |
| AD-78140.4 | 0.6 | 0.5 |
| AD-81721.1 | 0.6 | 0.5 |
| AD-81724.1 | 0.6 | 0.5 |
| AD-81710.1 | 0.6 | 0.4 |
| AD-81711.1 | 0.7 | 0.5 |
| AD-81722.1 | 0.7 | 0.6 |
| AD-81708.2 | 0.7 | 0.5 |
| AD-81681.1 | 0.7 | 0.6 |
| AD-81678.2 | 0.8 | 0.6 |
| AD-81725.1 | 0.8 | 0.5 |
| AD-81720.1 | 0.8 | 0.6 |
| AD-81678.1 | 0.8 | 0.7 |
| AD-81691.1 | 0.8 | 0.7 |
| AD-81709.1 | 0.9 | 0.7 |
| AD-81713.1 | 0.9 | 0.8 |
| AD-81712.1 | 0.9 | 0.8 |
| AD-81682.1 | 0.9 | 0.7 |
| AD-81693.1 | 1.0 | 0.8 |
| AD-81720.2 | 1.0 | 0.8 |
| AD-81745.1 | 1.0 | 0.9 |
| AD-81719.1 | 1.0 | 0.8 |
| AD-81692.1 | 1.1 | 0.8 |
| AD-81692.2 | 1.1 | 0.7 |
| AD-81742.1 | 1.1 | 0.8 |
| AD-81693.2 | 1.1 | 0.8 |
| AD-81718.1 | 1.1 | 0.8 |
| AD-78153.4 | 1.1 | 0.8 |
| AD-81705.2 | 1.2 | 1.0 |
| AD-81727.1 | 1.3 | 0.9 |
| AD-81705.1 | 1.3 | 1.0 |
| AD-81694.1 | 1.4 | 1.3 |
| AD-81683.1 | 1.4 | 1.1 |
| AD-81677.2 | 1.8 | 1.7 |
| AD-81716.1 | 1.9 | 1.4 |
| AD-81717.1 | 1.9 | 1.6 |
| AD-81735.1 | 2.2 | 1.5 |
| AD-81695.1 | 2.4 | 2.6 |
| AD-81706.1 | 2.6 | 1.8 |
| AD-81737.1 | 2.7 | 2.0 |
| AD-81744.1 | 2.8 | 1.9 |
| AD-81677.1 | 2.8 | 2.1 |
| AD-81697.1 | 3.6 | 2.8 |
| AD-81686.1 | 3.6 | 2.6 |
| AD-81684.1 | 3.7 | 2.6 |
| AD-81732.1 | 3.7 | 2.8 |
| AD-81740.1 | 3.9 | 3.0 |
| AD-81738.1 | 4.0 | 2.9 |
| AD-81698.1 | 4.8 | 3.6 |
| AD-81703.1 | 5.0 | 5.7 |
| AD-81731.1 | 5.0 | 3.7 |
| AD-81739.1 | 5.1 | 5.1 |
| AD-81730.1 | 5.1 | 4.1 |
| AD-81748.1 | 5.7 | 3.8 |
| AD-81734.1 | 6.4 | 4.4 |
| AD-81746.1 | 6.4 | 4.3 |
| AD-81729.1 | 6.6 | 4.9 |
| AD-81688.1 | 6.8 | 4.8 |
| AD-81733.1 | 7.1 | 4.8 |
| AD-81701.1 | 8.8 | 5.9 |
| AD-81704.1 | 9.5 | 9.3 |
| AD-81702.1 | 9.7 | 6.5 |
| AD-81741.1 | 10.1 | 7.7 |
| AD-81747.1 | 10.6 | 7.5 |
| AD-81687.1 | 11.8 | 8.0 |
| AD-81726.1 | 12.2 | 8.6 |
| AD-81689.1 | 25.5 | 19.5 |
| AD-81685.1 | 27.4 | 18.2 |
| AD-81699.1 | 27.7 | 19.1 |
| AD-81743.1 | 37.9 | 27.0 |
| AD-81700.1 | 55.5 | 40.6 |

### Example 3. In Vivo Screening of LECT2 siRNA

Pharmacodynamics of Three Exemplary LECT2 siRNAs in Rodent AAV Models

[0683] The sequences and chemistry of the three exemplary LECT2 siRNAs, AD-454781, AD-1333461, and AD-454746, that were investigated in the rodent AAV models, are depicted in FIG. 2. Wildtype B6/C57 mice (Charles Rivers Laboratory) were intravenously injected with human LECT2 constructs under a liver-specific promoter, TBG, that were packaged in AAV8 viral particles (2×10¹¹ gc/mouse). After two weeks, mice were injected subcutaneously with 2 mg/kg of one of the three LECT2 siRNAs shown in FIG. 2, or a PBS control. On day 14 post-treatment, livers were harvested for qPCR analysis (done as described in Example 2) with a probe specifically recognizing LECT2. Mouse GAPDH was used as normalization control. Relative levels of human LECT2 mRNA in the liver were calculated with the delta/delta Ct method, normalized to PBS control groups, and is depicted as percent LECT2 remaining on the Y-axis in FIG. 3. As seen in FIG. 3, administration of the AD-454746 siRNA led to approximately a 70% decrease in LECT2 liver mRNA; the AD-133461 siRNA led to a 60% decrease; and the AD454781 siRNA led to the greatest decrease, at ~80%.

[0684] Whole blood was also harvested from the mice treated either the siRNA or PBS control. Whole blood was collected in heparinized tubes both prior to treatment and at day 14 post-treatment in order to generate heparin plasma. The plasma was diluted 1:50-1:75 and run on a LECT2 specific ELISA to quantify circulating levels of the protein. To perform the ELISA, plates were pre-coated overnight at 4° C., with 100 μL of the mouse anti-human LECT2 capture antibody (R&D cat. #MAB722), which was diluted to a concentration of 1 μg/mL. Plates were washed with PBS-T, blocked for 1 hour with PBS/3% BSA at room temperature, and then washed an additional 5 times. The plasma samples (100 μL per well) were then added to plate and incubated for 1 hour at room temperature with shaking (~600 rpm). A human plasma standard (Abcam, Cat #ab188467, 500 μg/ml, Lot #GR3202526-3) was used as a control. The plate was then washed five times, the detection antibody (AbD31038.2 Anti-col_hLECT2, Fab-Max-FH BioRad) was added to the plate (100 μL per well), and the plate was then incubated at room temperature for 1 hour with shaking (~600 rpm). Subsequently, the plate was washed 5 times, the human Anti-bacterial Alkaline Phosphatase:HRP antibody (Bio-Rad, Cat #HCA275P) was added to the wells (100 μL per well), and the plate was then incubated at room temperature for 1 hour with shaking (~600 rpm). Plate was washed followed by addition of the TMB reagent (TMB Surmodics Cat #TMBS-0100-01) and a 10 minute incubation. This reaction was then quenched with 100 μL of the sulfuric acid stop solution (Nova-Stop Solution, Surmodics Cat #ASTP-0100-01), and absorbance was measured at 450 nm.

[0685] Using the values from the LECT2 specific ELISA, the relative levels of plasma LECT2 protein were calculated by normalization to protein levels prior to dosing, which is depicted as percent LECT2 remaining on the Y-axis in FIG. 3. As can be seen in FIG. 3, administration of the AD-454746 siRNA led to approximately a 75% decrease in LECT2 plasma protein levels; the AD-133461 siRNA led to a 70% decrease; and the AD454781 siRNA led to the greatest decrease, at ~80%.

Pharmacodynamics of Three Exemplary LECT2 siRNAs in Cynomolgus Monkeys

[0686] The three LECT2 siRNAs depicted in FIG. 2 were injected subcutaneously into cynomolgus monkeys at increasing doses of 0.3 mg/kg, 1 mg/kg, and 3 mg/kg (FIGS. 4A-4C, respectively). Plasma was collected in heparinized tubes pre-treatment and at various timepoints post-treatment, which are depicted on the X-axis in FIGS. 4A-4C. Circulating levels of LECT2 plasma protein were quantified by ELISA. Relative levels of plasma LECT2 protein were calculated by normalization to protein levels prior to treatment, which is depicted as plasma LECT2 protein knockdown on the Y-axis in FIGS. 4A-4C. As can be seen in FIGS. 4A-4C, there was a dose-dependent increase in silencing, as the greatest knockdown in protein levels was observed when all three of the LECT2 siRNAs were administered at 3 mg/kg (FIG. 4C). However, administering as low as 0.3 mg/kg of each siRNA did result in some knockdown of the LECT2 protein (FIG. 4A). Additionally, across all three doses administered, the AD-454781 siRNA led to the greatest knockdown in protein levels at all timepoints post-treatment (FIGS. 4A-4C and Table 5). Plasma LECT2 protein knockdown quantified on day 29 post-treatment in the monkeys for each of the LECT2 siRNAs administered at either 1 mg/kg or 3 mg/is also summarized in Table 5 below.

TABLE 5
Efficacy and duration of three exemplary LECT2 siRNAs in
cynomolgus monkeys as measured by percent knockdown
of LECT2 plasma protein levels

| | Potency and duration | |
|---|---|---|
| | Plasma LECT2 protein % knockdown | |
| | Day 29 | |
| siRNA | 1 mg/kg | 3 mg/kg |
| AD-454781 | 90% | 97% |
| AD-133461 | 77% | 90% |
| AD-454746 | 50% | 68% |

Assessment of LECT2 Knockdown in Rodents with the AD-86459 and AD-86460 siRNAs

[0687] The LECT2 siRNAs, AD-86459 and AD-86460 (Tables 6 and 7), or a PBS control were injected subcutaneously into SD-1 rats (FIG. 5A) and CD-1 mice (FIG. 5B). The experimental and control treatments were administered monthly at 10 mg/kg. Livers were harvested at 3, 6, or 12 months post-first dosing. Liver RNA was isolated for qPCR analysis (done as described in Example 2) using primers and probes specific for murine/rat LECT2 and also murine/rat GAPDH, which was the normalization control. Relative levels of rodent LECT2 mRNA in the liver were calculated using the ΔΔCt method, normalizing to the PBS controls, which is depicted as expression fold difference on the Y-axis of the graphs in FIGS. 5A-5B. Data are presented in FIG. 5 with mean±standard deviation and each point representing an individual rodent. In both rats (FIG. 5A) and mice (FIG. 5B), the AD-86459 siRNA and the AD-86460 siRNA led to almost complete knockdown of the LECT2 miRNA in the liver at all timepoints post-initial treatment that were sampled.

TABLE 6
LECT2 siRNA Modified Sequences

| | Seq ID | | | |
|---|---|---|---|---|
| Duplex | No: | | Seq ID No: | |
| Name | (sense) | Sense Seq | (antisense) | Antisense Seq |
| AD-86459 | 889 | cscsgaagAfaAfCfGfugcauucuaaL96 | 890 | usUfsagaAfuGfCfacguUfuCfuuc |
| | | | | ggsgsa |
| AD-86460 | 891 | gsusgucaAfaAfUfUfuucuacauuaL96 | 892 | usAfsaugUfaGfAfaaauUfuUfgac |
| | | | | acsasa |

TABLE 7
LECT2 siRNA Unmodified Sequences

| | Seq ID | | | |
|---|---|---|---|---|
| Duplex | No: | | Seq ID No: | |
| Name | (sense) | Sense Seq | (antisense) | Antisense Seq |
| AD-86459 | 893 | CCGAAGAAACGUGCAUUCUAA | 894 | UUAGAAUGCACGUUUCUUCGGGA |
| AD-86460 | 895 | GUGUCAAAAUUUUCUACAUUA | 896 | UAAUGUAGAAAAUUUUGACACAA |

Assessment of LECT2 Knockdown in Cynomolgus Monkeys with the AD-81725 siRNA

[0688] Cynomolgus monkeys were injected subcutaneously with the LECT2 siRNA, AD-81725, or a PBS control (FIGS. 6A-6B). The experimental and control treatments were administered monthly at 3 mg/kg. Livers were harvested at 6 months post-first dosing. Liver RNA was isolated for qPCR analysis (done as described in Example 2) using primers and probes specific for cynomolgus LECT2 and also cynomolgus GAPDH, which was the normalization control. Relative levels of cynomolgus LECT2 mRNA in the liver were calculated using the ΔΔCt method, normalizing to the PBS controls, which is depicted as expression fold difference on the Y-axis in FIG. 6A. Data are presented in FIG. 6A with mean±standard deviation and each point representing an individual monkey. The AD-81725 siRNA led to almost complete knockdown of the LECT2 miRNA in the liver of the monkeys at 6 months post-initial dosing.

[0689] Whole blood was also collected in heparinized tubes pre-treatment and each month for a six month duration post-initial treatment (FIG. 6B). Plasma was isolated and used to measure circulating levels of LECT2 protein by ELISA specific for human/cynomolgus LECT2 protein. Relative levels of LECT2 protein were calculated by normalizing to pre-treatment protein levels, which is depicted as plasma LECT2 protein remaining on the Y axis in FIG. 6B. The AD-81725 siRNA led to a >99% decrease in LECT2 plasma protein levels in the monkeys, which was observed at each timepoint sampled post-first dosing (FIG. 6B).

### EQUIVALENTS

[0690] Those skilled in the art will recognize, or be able to ascertain using no more than routine experimentation, many equivalents to the specific embodiments of the disclosure described herein. Such equivalents are intended to be encompassed by the following claims.

The application's sequence listing, which the Patent Office published only in electronic form, follows.

SEQUENCE LISTING (906 sequences)

SEQ ID NO: 1 - DNA, 1077 bp, Homo sapiens
  source 1..1077: mol_type = other DNA
aaatcaaatagctatccatggaatattagaacttgacttgctccatcctcttaaactttttgtgtctcacactaaagaaatgagagatgcagaattctaaggctaaatagctaggaagtattcattcaaacttgaatattcttcaaagagagtgtgggggcaactctaatcagaggaagaaactaaaggaagtaaaaccagatgttttccaccaaagccctccttttggctggtctgatttctaccgcactggcagggccatgggctaatatatgtgctggcaagtcttccaatgagatccggacgtgtgaccgccatggctgtggacagtactctgctcaaagaagtcagaggcctcaccagggtgtggacatcttgtgctctgctggatctactgtgtacgcaccattcactggaatgattgtgggccaggagaaaccttatcaaaacaagaatgctatcaataatggtgttcgaatatctggaagaggtttttgtgtcaaaatgttctacattaagccaattaagtataaaggtcctattaagaagggagaaaaacttggaactctattgcccttgcagaaagtttatcctggcatacaatcgcatgtgcacattgaaaactgtgactcgagtgaccctactgcatacctgtaaatcgaaggccaatggtcagatcttcaaaataaaaagtcatcttaaaaacctggatgcatacccttctcttcaagaaatttgtgttcacaaaggaaaaatgcatgaagggatggataccccattttccatgacatgattattacacattgcatgcctgtatcaaaacatctcacgtacctcataaacatatacacctatgtacccacaaaaattttttaattaaaaaaaggaaatttgagtttaaatagaaacatgataaatgcaagaaagaaaacattttgattttaactcattgtcactctgatgttcatgtgaactggttgcttcgggctctttgatctgtcacctatggaatctgagtggttttattttttagatttctcagtcccaaagatctaagataaataaacaagagaactt

SEQ ID NO: 2 - RNA, 21 nt, synthetic construct
  source 1..21: mol_type = other RNA
  modified_base 1: mod_base = OTHER; note = 2'-O-methylcytidine-3'-phosphorothioate
  modified_base 2: mod_base = OTHER; note = 2'-O-methyladenosine-3'-phosphorothioate
  modified_base 3: mod_base = OTHER; note = 2'-O-methyluridine-3'-phosphate
  modified_base 4: mod_base = OTHER; note = 2'-O-methylguanosine-3'-phosphate
  modified_base 5: mod_base = OTHER; note = 2'-O-methyluridine-3'-phosphate
  modified_base 6: mod_base = OTHER; note = 2'-O-methylguanosine-3'-phosphate
  modified_base 7: mod_base = OTHER; note = 2'-deoxy-2'-fluorocytidine-3'-phosphate
  modified_base 8: mod_base = OTHER; note = 2'-O-methyladenosine-3'-phosphate
  modified_base 9: mod_base = OTHER; note = 2'-deoxy-2'-fluorocytidine-3'-phosphate
  modified_base 10: mod_base = OTHER; note = 2'-deoxy-2'-fluoroadenosine-3'-phosphate
  modified_base 11: mod_base = OTHER; note = 2'-deoxy-2'-fluorouridine-3'-phosphate
  modified_base 12: mod_base = OTHER; note = 2'-O-methyluridine-3'-phosphate
  modified_base 13: mod_base = OTHER; note = 2'-O-methylguanosine-3'-phosphate
  modified_base 14: mod_base = OTHER; note = 2'-O-methyladenosine-3'-phosphate
  modified_base 15: mod_base = OTHER; note = 2'-O-methyladenosine-3'-phosphate
  modified_base 16: mod_base = OTHER; note = 2'-O-methyladenosine-3'-phosphate
  modified_base 17: mod_base = OTHER; note = 2'-O-methyladenosine-3'-phosphate
  modified_base 18: mod_base = OTHER; note = 2'-O-methylcytidine-3'-phosphate
  modified_base 19: mod_base = OTHER; note = 2'-O-methyluridine-3'-phosphate
  modified_base 20: mod_base = OTHER; note = 2'-O-methylguanosine-3'-phosphate
  modified_base 21: mod_base = OTHER; note = 2'-O-methyluridine-3'-phosphate ((2S,4R)-1-[29-[[2-(acetylamino)-2-deoxy-beta-D-galactopyra nosyl]oxy]-14,14-bis[[3-[[3-[[5-[[2-(acetylamino)-2-deoxy-b eta-D-galactopyranosyl]oxy]-1-oxopentyl]amino]propyl]amino] -3-oxopropoxy]methyl]-1,12,19,25-tetraoxo-16-oxa-13,20,24-t riazanonacos-1-yl]-4-hydroxy-2-pyrrolidinyl)methyl ester
catgtgcacattgaaaactgt

SEQ ID NO: 3 - RNA, 23 nt, synthetic construct
  source 1..23: mol_type = other RNA
  modified_base 1: mod_base = OTHER; note = 2'-O-methyladenosine-3'-phosphorothioate
  modified_base 2: mod_base = OTHER; note = 2'-deoxy-2'-fluorocytidine-3'-phosphorothioate
  modified_base 3: mod_base = OTHER; note = 2'-O-methyladenosine-3'-phosphate
  modified_base 4: mod_base = OTHER; note = 2'-O-methylguanosine-3'-phosphate
  modified_base 5: mod_base = OTHER; note = 2'-O-methyluridine-3'-phosphate
  modified_base 6: mod_base = OTHER; note = 2'-O-methyluridine-3'-phosphate
  modified_base 7: mod_base = OTHER; note = Thymidine-glycol nucleic acid (GNA), S-Isomer
  modified_base 8: mod_base = OTHER; note = 2'-O-methyluridine-3'-phosphate
  modified_base 9: mod_base = OTHER; note = 2'-O-methylcytidine-3'-phosphate
  modified_base 10: mod_base = OTHER; note = 2'-O-methyladenosine-3'-phosphate
  modified_base 11: mod_base = OTHER; note = 2'-O-methyladenosine-3'-phosphate
  modified_base 12: mod_base = OTHER; note = 2'-O-methyluridine-3'-phosphate
  modified_base 13: mod_base = OTHER; note = 2'-O-methylguanosine-3'-phosphate
  modified_base 14: mod_base = OTHER; note = 2'-deoxy-2'-fluorouridine-3'-phosphate
  modified_base 15: mod_base = OTHER; note = 2'-O-methylguanosine-3'-phosphate
  modified_base 16: mod_base = OTHER; note = 2'-deoxy-2'-fluorocytidine-3'-phosphate
  modified_base 17: mod_base = OTHER; note = 2'-O-methyladenosine-3'-phosphate
  modified_base 18: mod_base = OTHER; note = 2'-O-methylcytidine-3'-phosphate
  modified_base 19: mod_base = OTHER; note = 2'-O-methyladenosine-3'-phosphate
  modified_base 20: mod_base = OTHER; note = 2'-O-methyluridine-3'-phosphate
  modified_base 21: mod_base = OTHER; note = 2'-O-methylguanosine-3'-phosphorothioate
  modified_base 22: mod_base = OTHER; note = 2'-O-methylcytidine-3'-phosphorothioate
  modified_base 23: mod_base = OTHER; note = 2'-O-methylguanosine
acagttttcaatgtgcacatgcg

SEQ ID NO: 4 - RNA, 23 nt, synthetic construct
  source 1..23: mol_type = other RNA
  modified_base 5: mod_base = OTHER; note = 5'-methyluridine-3'-phosphate
  modified_base 7: mod_base = OTHER; note = 5'-methyluridine-3'-phosphate
  modified_base 13: mod_base = OTHER; note = 5'-methyluridine-3'-phosphate
  modified_base 14: mod_base = OTHER; note = 5'-methyluridine-3'-phosphate
  modified_base 21: mod_base = OTHER; note = 5'-methyluridine-3'-phosphate
  modified_base 23: mod_base = OTHER; note = 5'-methyluridine
cgcatgtgcacattgaaaactgt

SEQ ID NO: 5 - RNA, 21 nt, synthetic construct
  source 1..21: mol_type = other RNA
  modified_base 1: mod_base = OTHER; note = 2'-O-methylcytidine-3'-phosphorothioate
  modified_base 2: mod_base = OTHER; note = 2'-O-methyladenosine-3'-phosphorothioate
  modified_base 3: mod_base = OTHER; note = 2'-O-methyluridine-3'-phosphate
  modified_base 4: mod_base = OTHER; note = 2'-O-methylguanosine-3'-phosphate
  modified_base 5: mod_base = OTHER; note = 2'-O-methyluridine-3'-phosphate
  modified_base 6: mod_base = OTHER; note = 2'-O-methylguanosine-3'-phosphate
  modified_base 7: mod_base = OTHER; note = 2'-deoxy-2'-fluorocytidine-3'-phosphate
  modified_base 8: mod_base = OTHER; note = 2'-O-methyladenosine-3'-phosphate
  modified_base 9: mod_base = OTHER; note = 2'-deoxy-2'-fluorocytidine-3'-phosphate
  modified_base 10: mod_base = OTHER; note = 2'-deoxy-2'-fluoroadenosine-3'-phosphate
  modified_base 11: mod_base = OTHER; note = 2'-deoxy-2'-fluorouridine-3'-phosphate
  modified_base 12: mod_base = OTHER; note = 2'-O-methyluridine-3'-phosphate
  modified_base 13: mod_base = OTHER; note = 2'-O-methylguanosine-3'-phosphate
  modified_base 14: mod_base = OTHER; note = 2'-O-methyladenosine-3'-phosphate
  modified_base 15: mod_base = OTHER; note = 2'-O-methyladenosine-3'-phosphate
  modified_base 16: mod_base = OTHER; note = 2'-O-methyladenosine-3'-phosphate
  modified_base 17: mod_base = OTHER; note = 2'-O-methyladenosine-3'-phosphate
  modified_base 18: mod_base = OTHER; note = 2'-O-methylcytidine-3'-phosphate
  modified_base 19: mod_base = OTHER; note = 2'-O-methyluridine-3'-phosphate
  modified_base 20: mod_base = OTHER; note = 2'-O-methylguanosine-3'-phosphate
  modified_base 21: mod_base = OTHER; note = 2'-O-methyluridine-3'-phosphate ((2S,4R)-1-[29-[[2-(acetylamino)-2-deoxy-beta-D-galactopyra nosyl]oxy]-14,14-bis[[3-[[3-[[5-[[2-(acetylamino)-2-deoxy-b eta-D-galactopyranosyl]oxy]-1-oxopentyl]amino]propyl]amino] -3-oxopropoxy]methyl]-1,12,19,25-tetraoxo-16-oxa-13,20,24-t riazanonacos-1-yl]-4-hydroxy-2-pyrrolidinyl)methyl ester
catgtgcacattgaaaactgt

SEQ ID NO: 6 - RNA, 23 nt, synthetic construct
  source 1..23: mol_type = other RNA
  modified_base 1: mod_base = OTHER; note = 2'-O-methyladenosine-3'-phosphorothioate
  modified_base 2: mod_base = OTHER; note = 2'-deoxy-2'-fluorocytidine-3'-phosphorothioate
  modified_base 3: mod_base = OTHER; note = 2'-O-methyladenosine-3'-phosphate
  modified_base 4: mod_base = OTHER; note = 2'-O-methylguanosine-3'-phosphate
  modified_base 5: mod_base = OTHER; note = 2'-O-methyluridine-3'-phosphate
  modified_base 6: mod_base = OTHER; note = 2'-O-methyluridine-3'-phosphate
  modified_base 7: mod_base = OTHER; note = Thymidine-glycol nucleic acid (GNA), S-Isomer
  modified_base 8: mod_base = OTHER; note = 2'-O-methyluridine-3'-phosphate
  modified_base 9: mod_base = OTHER; note = 2'-O-methylcytidine-3'-phosphate
  modified_base 10: mod_base = OTHER; note = 2'-O-methyladenosine-3'-phosphate
  modified_base 11: mod_base = OTHER; note = 2'-O-methyladenosine-3'-phosphate
  modified_base 12: mod_base = OTHER; note = 2'-O-methyluridine-3'-phosphate
  modified_base 13: mod_base = OTHER; note = 2'-O-methylguanosine-3'-phosphate
  modified_base 14: mod_base = OTHER; note = 2'-deoxy-2'-fluorouridine-3'-phosphate
  modified_base 15: mod_base = OTHER; note = 2'-O-methylguanosine-3'-phosphate
  modified_base 16: mod_base = OTHER; note = 2'-deoxy-2'-fluorocytidine-3'-phosphate
  modified_base 17: mod_base = OTHER; note = 2'-O-methyladenosine-3'-phosphate
  modified_base 18: mod_base = OTHER; note = 2'-O-methylcytidine-3'-phosphate
  modified_base 19: mod_base = OTHER; note = 2'-O-methyladenosine-3'-phosphate
  modified_base 20: mod_base = OTHER; note = 2'-O-methyluridine-3'-phosphate
  modified_base 21: mod_base = OTHER; note = 2'-O-methylguanosine-3'-phosphorothioate
  modified_base 22: mod_base = OTHER; note = 2'-O-methylguanosine-3'-phosphorothioate
  modified_base 23: mod_base = OTHER; note = 2'-O-methylguanosine
acagttttcaatgtgcacatggg

SEQ ID NO: 7 - RNA, 23 nt, synthetic construct
  source 1..23: mol_type = other RNA
  modified_base 5: mod_base = OTHER; note = 5'-methyluridine-3'-phosphate
  modified_base 7: mod_base = OTHER; note = 5'-methyluridine-3'-phosphate
  modified_base 13: mod_base = OTHER; note = 5'-methyluridine-3'-phosphate
  modified_base 14: mod_base = OTHER; note = 5'-methyluridine-3'-phosphate
  modified_base 21: mod_base = OTHER; note = 5'-methyluridine-3'-phosphate
  modified_base 23: mod_base = OTHER; note = 5'-methyluridine
cccatgtgcacattgaaaactgt

SEQ ID NO: 8 - RNA, 21 nt, synthetic construct
  source 1..21: mol_type = other RNA
  modified_base 1: mod_base = OTHER; note = 2'-O-methylcytidine-3'-phosphorothioate
  modified_base 2: mod_base = OTHER; note = 2'-O-methyladenosine-3'-phosphorothioate
  modified_base 3: mod_base = OTHER; note = 2'-O-methyluridine-3'-phosphate
  modified_base 4: mod_base = OTHER; note = 2'-O-methylguanosine-3'-phosphate
  modified_base 5: mod_base = OTHER; note = 2'-O-methyluridine-3'-phosphate
  modified_base 6: mod_base = OTHER; note = 2'-O-methylguanosine-3'-phosphate
  modified_base 7: mod_base = OTHER; note = 2'-deoxy-2'-fluorocytidine-3'-phosphate
  modified_base 8: mod_base = OTHER; note = 2'-O-methyladenosine-3'-phosphate
  modified_base 9: mod_base = OTHER; note = 2'-deoxy-2'-fluorocytidine-3'-phosphate
  modified_base 10: mod_base = OTHER; note = 2'-deoxy-2'-fluoroadenosine-3'-phosphate
  modified_base 11: mod_base = OTHER; note = 2'-deoxy-2'-fluorouridine-3'-phosphate
  modified_base 12: mod_base = OTHER; note = 2'-O-methyluridine-3'-phosphate
  modified_base 13: mod_base = OTHER; note = 2'-O-methylguanosine-3'-phosphate
  modified_base 14: mod_base = OTHER; note = 2'-O-methyladenosine-3'-phosphate
  modified_base 15: mod_base = OTHER; note = 2'-O-methyladenosine-3'-phosphate
  modified_base 16: mod_base = OTHER; note = 2'-O-methyladenosine-3'-phosphate
  modified_base 17: mod_base = OTHER; note = 2'-O-methyladenosine-3'-phosphate
  modified_base 18: mod_base = OTHER; note = 2'-O-methylcytidine-3'-phosphate
  modified_base 19: mod_base = OTHER; note = 2'-O-methyluridine-3'-phosphate
  modified_base 20: mod_base = OTHER; note = 2'-O-methylguanosine-3'-phosphate
  modified_base 21: mod_base = OTHER; note = 2'-O-methyluridine-3'-phosphate ((2S,4R)-1-[29-[[2-(acetylamino)-2-deoxy-beta-D-galactopyra nosyl]oxy]-14,14-bis[[3-[[3-[[5-[[2-(acetylamino)-2-deoxy-b eta-D-galactopyranosyl]oxy]-1-oxopentyl]amino]propyl]amino] -3-oxopropoxy]methyl]-1,12,19,25-tetraoxo-16-oxa-13,20,24-t riazanonacos-1-yl]-4-hydroxy-2-pyrrolidinyl)methyl ester
catgtgcacattgaaaactgt

SEQ ID NO: 9 - RNA, 23 nt, synthetic construct
  source 1..23: mol_type = other RNA
  modified_base 1: mod_base = OTHER; note = 2'-O-methyladenosine-3'-phosphorothioate
  modified_base 2: mod_base = OTHER; note = 2'-deoxy-2'-fluorocytidine-3'-phosphorothioate
  modified_base 3: mod_base = OTHER; note = 2'-O-methyladenosine-3'-phosphate
  modified_base 4: mod_base = OTHER; note = 2'-O-methylguanosine-3'-phosphate
  modified_base 5: mod_base = OTHER; note = 2'-O-methyluridine-3'-phosphate
  modified_base 6: mod_base = OTHER; note = 2'-O-methyluridine-3'-phosphate
  modified_base 7: mod_base = OTHER; note = Thymidine-glycol nucleic acid (GNA), S-Isomer
  modified_base 8: mod_base = OTHER; note = 2'-O-methyluridine-3'-phosphate
  modified_base 9: mod_base = OTHER; note = 2'-O-methylcytidine-3'-phosphate
  modified_base 10: mod_base = OTHER; note = 2'-O-methyladenosine-3'-phosphate
  modified_base 11: mod_base = OTHER; note = 2'-O-methyladenosine-3'-phosphate
  modified_base 12: mod_base = OTHER; note = 2'-O-methyluridine-3'-phosphate
  modified_base 13: mod_base = OTHER; note = 2'-O-methylguanosine-3'-phosphate
  modified_base 14: mod_base = OTHER; note = 2'-deoxy-2'-fluorouridine-3'-phosphate
  modified_base 15: mod_base = OTHER; note = 2'-O-methylguanosine-3'-phosphate
  modified_base 16: mod_base = OTHER; note = 2'-deoxy-2'-fluorocytidine-3'-phosphate
  modified_base 17: mod_base = OTHER; note = 2'-O-methyladenosine-3'-phosphate
  modified_base 18: mod_base = OTHER; note = 2'-O-methylcytidine-3'-phosphate
  modified_base 19: mod_base = OTHER; note = 2'-O-methyladenosine-3'-phosphate
  modified_base 20: mod_base = OTHER; note = 2'-O-methyluridine-3'-phosphate
  modified_base 21: mod_base = OTHER; note = 2'-O-methylguanosine-3'-phosphorothioate
  modified_base 22: mod_base = OTHER; note = 2'-O-methylguanosine-3'-phosphorothioate
  modified_base 23: mod_base = OTHER; note = 2'-O-methyluridine
acagttttcaatgtgcacatggt

SEQ ID NO: 10 - RNA, 23 nt, synthetic construct
  source 1..23: mol_type = other RNA
  modified_base 5: mod_base = OTHER; note = 5'-methyluridine-3'-phosphate
  modified_base 7: mod_base = OTHER; note = 5'-methyluridine-3'-phosphate
  modified_base 13: mod_base = OTHER; note = 5'-methyluridine-3'-phosphate
  modified_base 14: mod_base = OTHER; note = 5'-methyluridine-3'-phosphate
  modified_base 21: mod_base = OTHER; note = 5'-methyluridine-3'-phosphate
  modified_base 23: mod_base = OTHER; note = 5'-methyluridine
accatgtgcacattgaaaactgt

SEQ ID NO: 11 - RNA, 19 nt, synthetic construct
  source 1..19: mol_type = other RNA
  modified_base 1: mod_base = OTHER; note = 2'-O-methyluridine-3'-phosphorothioate
  modified_base 2: mod_base = OTHER; note = 2'-O-methylguanosine-3'-phosphorothioate
  modified_base 3: mod_base = OTHER; note = 2'-O-methyluridine-3'-phosphate
  modified_base 4: mod_base = OTHER; note = 2'-O-methylguanosine-3'-phosphate
  modified_base 5: mod_base = OTHER; note = 2'-deoxy-2'-fluorocytidine-3'-phosphate
  modified_base 6: mod_base = OTHER; note = 2'-O-methyladenosine-3'-phosphate
  modified_base 7: mod_base = OTHER; note = 2'-deoxy-2'-fluorocytidine-3'-phosphate
  modified_base 8: mod_base = OTHER; note = 2'-deoxy-2'-fluoroadenosine-3'-phosphate
  modified_base 9: mod_base = OTHER; note = 2'-deoxy-2'-fluorouridine-3'-phosphate
  modified_base 10: mod_base = OTHER; note = 2'-O-methyluridine-3'-phosphate
  modified_base 11: mod_base = OTHER; note = 2'-O-methylguanosine-3'-phosphate
  modified_base 12: mod_base = OTHER; note = 2'-O-methyladenosine-3'-phosphate
  modified_base 13: mod_base = OTHER; note = 2'-O-methyladenosine-3'-phosphate
  modified_base 14: mod_base = OTHER; note = 2'-O-methyladenosine-3'-phosphate
  modified_base 15: mod_base = OTHER; note = 2'-O-methyladenosine-3'-phosphate
  modified_base 16: mod_base = OTHER; note = 2'-O-methylcytidine-3'-phosphate
  modified_base 17: mod_base = OTHER; note = 2'-O-methyluridine-3'-phosphate
  modified_base 18: mod_base = OTHER; note = 2'-O-methylguanosine-3'-phosphate
  modified_base 19: mod_base = OTHER; note = 2'-O-methyluridine-3'-phosphate ((2S,4R)-1-[29-[[2-(acetylamino)-2-deoxy-beta-D-galactopyra nosyl]oxy]-14,14-bis[[3-[[3-[[5-[[2-(acetylamino)-2-deoxy-b eta-D-galactopyranosyl]oxy]-1-oxopentyl]amino]propyl]amino] -3-oxopropoxy]methyl]-1,12,19,25-tetraoxo-16-oxa-13,20,24-t riazanonacos-1-yl]-4-hydroxy-2-pyrrolidinyl)methyl ester
tgtgcacattgaaaactgt

SEQ ID NO: 12 - RNA, 21 nt, synthetic construct
  source 1..21: mol_type = other RNA
  modified_base 1: mod_base = OTHER; note = 2'-O-methyladenosine-3'-phosphorothioate
  modified_base 2: mod_base = OTHER; note = 2'-deoxy-2'-fluorocytidine-3'-phosphorothioate
  modified_base 3: mod_base = OTHER; note = 2'-O-methyladenosine-3'-phosphate
  modified_base 4: mod_base = OTHER; note = 2'-O-methylguanosine-3'-phosphate
  modified_base 5: mod_base = OTHER; note = 2'-O-methyluridine-3'-phosphate
  modified_base 6: mod_base = OTHER; note = 2'-O-methyluridine-3'-phosphate
  modified_base 7: mod_base = OTHER; note = Thymidine-glycol nucleic acid (GNA), S-Isomer
  modified_base 8: mod_base = OTHER; note = 2'-O-methyluridine-3'-phosphate
  modified_base 9: mod_base = OTHER; note = 2'-O-methylcytidine-3'-phosphate
  modified_base 10: mod_base = OTHER; note = 2'-O-methyladenosine-3'-phosphate
  modified_base 11: mod_base = OTHER; note = 2'-O-methyladenosine-3'-phosphate
  modified_base 12: mod_base = OTHER; note = 2'-O-methyluridine-3'-phosphate
  modified_base 13: mod_base = OTHER; note = 2'-O-methylguanosine-3'-phosphate
  modified_base 14: mod_base = OTHER; note = 2'-deoxy-2'-fluorouridine-3'-phosphate
  modified_base 15: mod_base = OTHER; note = 2'-O-methylguanosine-3'-phosphate
  modified_base 16: mod_base = OTHER; note = 2'-deoxy-2'-fluorocytidine-3'-phosphate
  modified_base 17: mod_base = OTHER; note = 2'-O-methyladenosine-3'-phosphate
  modified_base 18: mod_base = OTHER; note = 2'-O-methylcytidine-3'-phosphate
  modified_base 19: mod_base = OTHER; note = 2'-O-methyladenosine-3'-phosphorothioate
  modified_base 20: mod_base = OTHER; note = 2'-O-methyluridine-3'-phosphorothioate
  modified_base 21: mod_base = OTHER; note = 2'-O-methylguanosine
acagttttcaatgtgcacatg

SEQ ID NO: 13 - RNA, 21 nt, synthetic construct
  source 1..21: mol_type = other RNA
  modified_base 3: mod_base = OTHER; note = 5'-methyluridine-3'-phosphate
  modified_base 5: mod_base = OTHER; note = 5'-methyluridine-3'-phosphate
  modified_base 11: mod_base = OTHER; note = 5'-methyluridine-3'-phosphate
  modified_base 12: mod_base = OTHER; note = 5'-methyluridine-3'-phosphate
  modified_base 19: mod_base = OTHER; note = 5'-methyluridine-3'-phosphate
  modified_base 21: mod_base = OTHER; note = 5'-methyluridine
catgtgcacattgaaaactgt

SEQ ID NO: 14 - RNA, 21 nt, synthetic construct
  source 1..21: mol_type = other RNA
  modified_base 1: mod_base = OTHER; note = 2'-O-methylcytidine-3'-phosphorothioate
  modified_base 2: mod_base = OTHER; note = 2'-O-methyladenosine-3'-phosphorothioate
  modified_base 3: mod_base = OTHER; note = 2'-O-methyluridine-3'-phosphate
  modified_base 4: mod_base = OTHER; note = 2'-O-methylguanosine-3'-phosphate
  modified_base 5: mod_base = OTHER; note = 2'-O-methyluridine-3'-phosphate
  modified_base 6: mod_base = OTHER; note = 2'-O-methylguanosine-3'-phosphate
  modified_base 7: mod_base = OTHER; note = 2'-deoxy-2'-fluorocytidine-3'-phosphate
  modified_base 8: mod_base = OTHER; note = 2'-O-methyladenosine-3'-phosphate
  modified_base 9: mod_base = OTHER; note = 2'-deoxy-2'-fluorocytidine-3'-phosphate
  modified_base 10: mod_base = OTHER; note = 2'-deoxy-2'-fluoroadenosine-3'-phosphate
  modified_base 11: mod_base = OTHER; note = 2'-deoxy-2'-fluorouridine-3'-phosphate
  modified_base 12: mod_base = OTHER; note = 2'-O-methyluridine-3'-phosphate
  modified_base 13: mod_base = OTHER; note = 2'-O-methylguanosine-3'-phosphate
  modified_base 14: mod_base = OTHER; note = 2'-O-methyladenosine-3'-phosphate
  modified_base 15: mod_base = OTHER; note = 2'-O-methyladenosine-3'-phosphate
  modified_base 16: mod_base = OTHER; note = 2'-O-methyladenosine-3'-phosphate
  modified_base 17: mod_base = OTHER; note = 2'-O-methyladenosine-3'-phosphate
  modified_base 18: mod_base = OTHER; note = 2'-O-methylcytidine-3'-phosphate
  modified_base 19: mod_base = OTHER; note = 2'-O-methyluridine-3'-phosphate
  modified_base 20: mod_base = OTHER; note = 2'-O-methylguanosine-3'-phosphate
  modified_base 21: mod_base = OTHER; note = 2'-O-methyluridine-3'-phosphate ((2S,4R)-1-[29-[[2-(acetylamino)-2-deoxy-beta-D-galactopyra nosyl]oxy]-14,14-bis[[3-[[3-[[5-[[2-(acetylamino)-2-deoxy-b eta-D-galactopyranosyl]oxy]-1-oxopentyl]amino]propyl]amino] -3-oxopropoxy]methyl]-1,12,19,25-tetraoxo-16-oxa-13,20,24-t riazanonacos-1-yl]-4-hydroxy-2-pyrrolidinyl)methyl ester
catgtgcacattgaaaactgt

SEQ ID NO: 15 - RNA, 23 nt, synthetic construct
  source 1..23: mol_type = other RNA
  modified_base 1: mod_base = OTHER; note = 2'-O-methyladenosine-3'-phosphorothioate
  modified_base 2: mod_base = OTHER; note = 2'-deoxy-2'-fluorocytidine-3'-phosphorothioate
  modified_base 3: mod_base = OTHER; note = 2'-O-methyladenosine-3'-phosphate
  modified_base 4: mod_base = OTHER; note = 2'-O-methylguanosine-3'-phosphate
  modified_base 5: mod_base = OTHER; note = 2'-O-methyluridine-3'-phosphate
  modified_base 6: mod_base = OTHER; note = 2'-O-methyluridine-3'-phosphate
  modified_base 7: mod_base = OTHER; note = Thymidine-glycol nucleic acid (GNA), S-Isomer
  modified_base 8: mod_base = OTHER; note = 2'-O-methyluridine-3'-phosphate
  modified_base 9: mod_base = OTHER; note = 2'-O-methylcytidine-3'-phosphate
  modified_base 10: mod_base = OTHER; note = 2'-O-methyladenosine-3'-phosphate
  modified_base 11: mod_base = OTHER; note = 2'-O-methyladenosine-3'-phosphate
  modified_base 12: mod_base = OTHER; note = 2'-deoxy-2'-fluorouridine-3'-phosphate
  modified_base 13: mod_base = OTHER; note = 2'-O-methylguanosine-3'-phosphate
  modified_base 14: mod_base = OTHER; note = 2'-deoxy-2'-fluorouridine-3'-phosphate
  modified_base 15: mod_base = OTHER; note = 2'-O-methylguanosine-3'-phosphate
  modified_base 16: mod_base = OTHER; note = 2'-deoxy-2'-fluorocytidine-3'-phosphate
  modified_base 17: mod_base = OTHER; note = 2'-O-methyladenosine-3'-phosphate
  modified_base 18: mod_base = OTHER; note = 2'-O-methylcytidine-3'-phosphate
  modified_base 19: mod_base = OTHER; note = 2'-O-methyladenosine-3'-phosphate
  modified_base 20: mod_base = OTHER; note = 2'-O-methyluridine-3'-phosphate
  modified_base 21: mod_base = OTHER; note = 2'-O-methylguanosine-3'-phosphorothioate
  modified_base 22: mod_base = OTHER; note = 2'-O-methylcytidine-3'-phosphorothioate
  modified_base 23: mod_base = OTHER; note = 2'-O-methylguanosine
acagttttcaatgtgcacatgcg

SEQ ID NO: 16 - RNA, 23 nt, synthetic construct
  source 1..23: mol_type = other RNA
  modified_base 5: mod_base = OTHER; note = 5'-methyluridine-3'-phosphate
  modified_base 7: mod_base = OTHER; note = 5'-methyluridine-3'-phosphate
  modified_base 13: mod_base = OTHER; note = 5'-methyluridine-3'-phosphate
  modified_base 14: mod_base = OTHER; note = 5'-methyluridine-3'-phosphate
  modified_base 21: mod_base = OTHER; note = 5'-methyluridine-3'-phosphate
  modified_base 23: mod_base = OTHER; note = 5'-methyluridine
cgcatgtgcacattgaaaactgt

SEQ ID NO: 17 - RNA, 21 nt, synthetic construct
  source 1..21: mol_type = other RNA
  modified_base 1: mod_base = OTHER; note = 2'-O-methylcytidine-3'-phosphorothioate
  modified_base 2: mod_base = OTHER; note = 2'-O-methyladenosine-3'-phosphorothioate
  modified_base 3: mod_base = OTHER; note = 2'-O-methyluridine-3'-phosphate
  modified_base 4: mod_base = OTHER; note = 2'-O-methylguanosine-3'-phosphate
  modified_base 5: mod_base = OTHER; note = 2'-O-methyluridine-3'-phosphate
  modified_base 6: mod_base = OTHER; note = 2'-O-methylguanosine-3'-phosphate
  modified_base 7: mod_base = OTHER; note = 2'-deoxy-2'-fluorocytidine-3'-phosphate
  modified_base 8: mod_base = OTHER; note = 2'-O-methyladenosine-3'-phosphate
  modified_base 9: mod_base = OTHER; note = 2'-deoxy-2'-fluorocytidine-3'-phosphate
  modified_base 10: mod_base = OTHER; note = 2'-deoxy-2'-fluoroadenosine-3'-phosphate
  modified_base 11: mod_base = OTHER; note = 2'-deoxy-2'-fluorouridine-3'-phosphate
  modified_base 12: mod_base = OTHER; note = 2'-O-methyluridine-3'-phosphate
  modified_base 13: mod_base = OTHER; note = 2'-O-methylguanosine-3'-phosphate
  modified_base 14: mod_base = OTHER; note = 2'-O-methyladenosine-3'-phosphate
  modified_base 15: mod_base = OTHER; note = 2'-O-methyladenosine-3'-phosphate
  modified_base 16: mod_base = OTHER; note = 2'-O-methyladenosine-3'-phosphate
  modified_base 17: mod_base = OTHER; note = 2'-O-methyladenosine-3'-phosphate
  modified_base 18: mod_base = OTHER; note = 2'-O-methylcytidine-3'-phosphate
  modified_base 19: mod_base = OTHER; note = 2'-O-methyluridine-3'-phosphate
  modified_base 20: mod_base = OTHER; note = 2'-O-methylguanosine-3'-phosphate
  modified_base 21: mod_base = OTHER; note = 2'-O-methyluridine-3'-phosphate ((2S,4R)-1-[29-[[2-(acetylamino)-2-deoxy-beta-D-galactopyra nosyl]oxy]-14,14-bis[[3-[[3-[[5-[[2-(acetylamino)-2-deoxy-b eta-D-galactopyranosyl]oxy]-1-oxopentyl]amino]propyl]amino] -3-oxopropoxy]methyl]-1,12,19,25-tetraoxo-16-oxa-13,20,24-t riazanonacos-1-yl]-4-hydroxy-2-pyrrolidinyl)methyl ester
catgtgcacattgaaaactgt

SEQ ID NO: 18 - RNA, 23 nt, synthetic construct
  source 1..23: mol_type = other RNA
  modified_base 1: mod_base = OTHER; note = 2'-O-methyladenosine-3'-phosphorothioate
  modified_base 2: mod_base = OTHER; note = 2'-deoxy-2'-fluorocytidine-3'-phosphorothioate
  modified_base 3: mod_base = OTHER; note = 2'-O-methyladenosine-3'-phosphate
  modified_base 4: mod_base = OTHER; note = 2'-deoxy-2'-fluoroguanosine-3'-phosphate
  modified_base 5: mod_base = OTHER; note = 2'-O-methyluridine-3'-phosphate
  modified_base 6: mod_base = OTHER; note = 2'-O-methyluridine-3'-phosphate
  modified_base 7: mod_base = OTHER; note = Thymidine-glycol nucleic acid (GNA), S-Isomer
  modified_base 8: mod_base = OTHER; note = 2'-O-methyluridine-3'-phosphate
  modified_base 9: mod_base = OTHER; note = 2'-O-methylcytidine-3'-phosphate
  modified_base 10: mod_base = OTHER; note = 2'-O-methyladenosine-3'-phosphate
  modified_base 11: mod_base = OTHER; note = 2'-O-methyladenosine-3'-phosphate
  modified_base 12: mod_base = OTHER; note = 2'-deoxy-2'-fluorouridine-3'-phosphate
  modified_base 13: mod_base = OTHER; note = 2'-O-methylguanosine-3'-phosphate
  modified_base 14: mod_base = OTHER; note = 2'-deoxy-2'-fluorouridine-3'-phosphate
  modified_base 15: mod_base = OTHER; note = 2'-O-methylguanosine-3'-phosphate
  modified_base 16: mod_base = OTHER; note = 2'-deoxy-2'-fluorocytidine-3'-phosphate
  modified_base 17: mod_base = OTHER; note = 2'-O-methyladenosine-3'-phosphate
  modified_base 18: mod_base = OTHER; note = 2'-O-methylcytidine-3'-phosphate
  modified_base 19: mod_base = OTHER; note = 2'-O-methyladenosine-3'-phosphate
  modified_base 20: mod_base = OTHER; note = 2'-O-methyluridine-3'-phosphate
  modified_base 21: mod_base = OTHER; note = 2'-O-methylguanosine-3'-phosphorothioate
  modified_base 22: mod_base = OTHER; note = 2'-O-methylcytidine-3'-phosphorothioate
  modified_base 23: mod_base = OTHER; note = 2'-O-methylguanosine
acagttttcaatgtgcacatgcg

SEQ ID NO: 19 - RNA, 23 nt, synthetic construct
  source 1..23: mol_type = other RNA
  modified_base 5: mod_base = OTHER; note = 5'-methyluridine-3'-phosphate
  modified_base 7: mod_base = OTHER; note = 5'-methyluridine-3'-phosphate
  modified_base 13: mod_base = OTHER; note = 5'-methyluridine-3'-phosphate
  modified_base 14: mod_base = OTHER; note = 5'-methyluridine-3'-phosphate
  modified_base 21: mod_base = OTHER; note = 5'-methyluridine-3'-phosphate
  modified_base 23: mod_base = OTHER; note = 5'-methyluridine
cgcatgtgcacattgaaaactgt

SEQ ID NO: 20 - RNA, 21 nt, synthetic construct
  source 1..21: mol_type = other RNA
  modified_base 1: mod_base = OTHER; note = 2'-O-methylcytidine-3'-phosphorothioate
  modified_base 2: mod_base = OTHER; note = 2'-O-methyladenosine-3'-phosphorothioate
  modified_base 3: mod_base = OTHER; note = 2'-O-methyluridine-3'-phosphate
  modified_base 4: mod_base = OTHER; note = 2'-O-methylguanosine-3'-phosphate
  modified_base 5: mod_base = OTHER; note = 2'-O-methyluridine-3'-phosphate
  modified_base 6: mod_base = OTHER; note = 2'-O-methylguanosine-3'-phosphate
  modified_base 7: mod_base = OTHER; note = 2'-deoxy-2'-fluorocytidine-3'-phosphate
  modified_base 8: mod_base = OTHER; note = 2'-O-methyladenosine-3'-phosphate
  modified_base 9: mod_base = OTHER; note = 2'-deoxy-2'-fluorocytidine-3'-phosphate
  modified_base 10: mod_base = OTHER; note = 2'-deoxy-2'-fluoroadenosine-3'-phosphate
  modified_base 11: mod_base = OTHER; note = 2'-deoxy-2'-fluorouridine-3'-phosphate
  modified_base 12: mod_base = OTHER; note = 2'-O-methyluridine-3'-phosphate
  modified_base 13: mod_base = OTHER; note = 2'-O-methylguanosine-3'-phosphate
  modified_base 14: mod_base = OTHER; note = 2'-O-methyladenosine-3'-phosphate
  modified_base 15: mod_base = OTHER; note = 2'-O-methyladenosine-3'-phosphate
  modified_base 16: mod_base = OTHER; note = 2'-O-methyladenosine-3'-phosphate
  modified_base 17: mod_base = OTHER; note = 2'-O-methyladenosine-3'-phosphate
  modified_base 18: mod_base = OTHER; note = 2'-O-methylcytidine-3'-phosphate
  modified_base 19: mod_base = OTHER; note = 2'-O-methyluridine-3'-phosphate
  modified_base 20: mod_base = OTHER; note = 2'-O-methylguanosine-3'-phosphate
  modified_base 21: mod_base = OTHER; note = 2'-O-methyluridine-3'-phosphate ((2S,4R)-1-[29-[[2-(acetylamino)-2-deoxy-beta-D-galactopyra nosyl]oxy]-14,14-bis[[3-[[3-[[5-[[2-(acetylamino)-2-deoxy-b eta-D-galactopyranosyl]oxy]-1-oxopentyl]amino]propyl]amino] -3-oxopropoxy]methyl]-1,12,19,25-tetraoxo-16-oxa-13,20,24-t riazanonacos-1-yl]-4-hydroxy-2-pyrrolidinyl)methyl ester
catgtgcacattgaaaactgt

SEQ ID NO: 21 - RNA, 23 nt, synthetic construct
  source 1..23: mol_type = other RNA
  modified_base 1: mod_base = OTHER; note = 2'-O-methyladenosine-3'-phosphorothioate
  modified_base 2: mod_base = OTHER; note = 2'-deoxy-2'-fluorocytidine-3'-phosphorothioate
  modified_base 3: mod_base = OTHER; note = 2'-O-methyladenosine-3'-phosphate
  modified_base 4: mod_base = OTHER; note = 2'-O-methylguanosine-3'-phosphate
  modified_base 5: mod_base = OTHER; note = 2'-O-methyluridine-3'-phosphate
  modified_base 6: mod_base = OTHER; note = 2'-O-methyluridine-3'-phosphate
  modified_base 7: mod_base = OTHER; note = Thymidine-glycol nucleic acid (GNA), S-Isomer
  modified_base 8: mod_base = OTHER; note = 2'-deoxy-2'-fluorouridine-3'-phosphate
  modified_base 9: mod_base = OTHER; note = 2'-deoxy-2'-fluorocytidine-3'-phosphate
  modified_base 10: mod_base = OTHER; note = 2'-O-methyladenosine-3'-phosphate
  modified_base 11: mod_base = OTHER; note = 2'-O-methyladenosine-3'-phosphate
  modified_base 12: mod_base = OTHER; note = 2'-O-methyluridine-3'-phosphate
  modified_base 13: mod_base = OTHER; note = 2'-O-methylguanosine-3'-phosphate
  modified_base 14: mod_base = OTHER; note = 2'-deoxy-2'-fluorouridine-3'-phosphate
  modified_base 15: mod_base = OTHER; note = 2'-O-methylguanosine-3'-phosphate
  modified_base 16: mod_base = OTHER; note = 2'-deoxy-2'-fluorocytidine-3'-phosphate
  modified_base 17: mod_base = OTHER; note = 2'-O-methyladenosine-3'-phosphate
  modified_base 18: mod_base = OTHER; note = 2'-O-methylcytidine-3'-phosphate
  modified_base 19: mod_base = OTHER; note = 2'-O-methyladenosine-3'-phosphate
  modified_base 20: mod_base = OTHER; note = 2'-O-methyluridine-3'-phosphate
  modified_base 21: mod_base = OTHER; note = 2'-O-methylguanosine-3'-phosphorothioate
  modified_base 22: mod_base = OTHER; note = 2'-O-methylcytidine-3'-phosphorothioate
  modified_base 23: mod_base = OTHER; note = 2'-O-methylguanosine
acagttttcaatgtgcacatgcg

SEQ ID NO: 22 - RNA, 23 nt, synthetic construct
  source 1..23: mol_type = other RNA
  modified_base 5: mod_base = OTHER; note = 5'-methyluridine-3'-phosphate
  modified_base 7: mod_base = OTHER; note = 5'-methyluridine-3'-phosphate
  modified_base 13: mod_base = OTHER; note = 5'-methyluridine-3'-phosphate
  modified_base 14: mod_base = OTHER; note = 5'-methyluridine-3'-phosphate
  modified_base 21: mod_base = OTHER; note = 5'-methyluridine-3'-phosphate
  modified_base 23: mod_base = OTHER; note = 5'-methyluridine
cgcatgtgcacattgaaaactgt

SEQ ID NO: 23 - RNA, 21 nt, synthetic construct
  source 1..21: mol_type = other RNA
  modified_base 1: mod_base = OTHER; note = 2'-O-methylcytidine-3'-phosphorothioate
  modified_base 2: mod_base = OTHER; note = 2'-O-methyladenosine-3'-phosphorothioate
  modified_base 3: mod_base = OTHER; note = 2'-O-methyluridine-3'-phosphate
  modified_base 4: mod_base = OTHER; note = 2'-O-methylguanosine-3'-phosphate
  modified_base 5: mod_base = OTHER; note = 2'-O-methyluridine-3'-phosphate
  modified_base 6: mod_base = OTHER; note = 2'-O-methylguanosine-3'-phosphate
  modified_base 7: mod_base = OTHER; note = 2'-deoxy-2'-fluorocytidine-3'-phosphate
  modified_base 8: mod_base = OTHER; note = 2'-O-methyladenosine-3'-phosphate
  modified_base 9: mod_base = OTHER; note = 2'-deoxy-2'-fluorocytidine-3'-phosphate
  modified_base 10: mod_base = OTHER; note = 2'-deoxy-2'-fluoroadenosine-3'-phosphate
  modified_base 11: mod_base = OTHER; note = 2'-deoxy-2'-fluorouridine-3'-phosphate
  modified_base 12: mod_base = OTHER; note = 2'-O-methyluridine-3'-phosphate
  modified_base 13: mod_base = OTHER; note = 2'-O-methylguanosine-3'-phosphate
  modified_base 14: mod_base = OTHER; note = 2'-O-methyladenosine-3'-phosphate
  modified_base 15: mod_base = OTHER; note = 2'-O-methyladenosine-3'-phosphate
  modified_base 16: mod_base = OTHER; note = 2'-O-methyladenosine-3'-phosphate
  modified_base 17: mod_base = OTHER; note = 2'-O-methyladenosine-3'-phosphate
  modified_base 18: mod_base = OTHER; note = 2'-O-methylcytidine-3'-phosphate
  modified_base 19: mod_base = OTHER; note = 2'-O-methyluridine-3'-phosphate
  modified_base 20: mod_base = OTHER; note = 2'-O-methylguanosine-3'-phosphate
  modified_base 21: mod_base = OTHER; note = 2'-O-methyluridine-3'-phosphate ((2S,4R)-1-[29-[[2-(acetylamino)-2-deoxy-beta-D-galactopyra nosyl]oxy]-14,14-bis[[3-[[3-[[5-[[2-(acetylamino)-2-deoxy-b eta-D-galactopyranosyl]oxy]-1-oxopentyl]amino]propyl]amino] -3-oxopropoxy]methyl]-1,12,19,25-tetraoxo-16-oxa-13,20,24-t riazanonacos-1-yl]-4-hydroxy-2-pyrrolidinyl)methyl ester
catgtgcacattgaaaactgt

SEQ ID NO: 24 - RNA, 23 nt, synthetic construct
  source 1..23: mol_type = other RNA
  modified_base 1: mod_base = OTHER; note = 2'-O-methyladenosine-3'-phosphorothioate
  modified_base 2: mod_base = OTHER; note = 2'-deoxy-2'-fluorocytidine-3'-phosphorothioate
  modified_base 3: mod_base = OTHER; note = 2'-O-methyladenosine-3'-phosphate
  modified_base 4: mod_base = OTHER; note = 2'-deoxy-2'-fluoroguanosine-3'-phosphate
  modified_base 5: mod_base = OTHER; note = 2'-O-methyluridine-3'-phosphate
  modified_base 6: mod_base = OTHER; note = 2'-O-methyluridine-3'-phosphate
  modified_base 7: mod_base = OTHER; note = Thymidine-glycol nucleic acid (GNA), S-Isomer
  modified_base 8: mod_base = OTHER; note = 2'-deoxy-2'-fluorouridine-3'-phosphate
  modified_base 9: mod_base = OTHER; note = 2'-deoxy-2'-fluorocytidine-3'-phosphate
  modified_base 10: mod_base = OTHER; note = 2'-O-methyladenosine-3'-phosphate
  modified_base 11: mod_base = OTHER; note = 2'-O-methyladenosine-3'-phosphate
  modified_base 12: mod_base = OTHER; note = 2'-deoxy-2'-fluorouridine-3'-phosphate
  modified_base 13: mod_base = OTHER; note = 2'-O-methylguanosine-3'-phosphate
  modified_base 14: mod_base = OTHER; note = 2'-deoxy-2'-fluorouridine-3'-phosphate
  modified_base 15: mod_base = OTHER; note = 2'-O-methylguanosine-3'-phosphate
  modified_base 16: mod_base = OTHER; note = 2'-deoxy-2'-fluorocytidine-3'-phosphate
  modified_base 17: mod_base = OTHER; note = 2'-O-methyladenosine-3'-phosphate
  modified_base 18: mod_base = OTHER; note = 2'-O-methylcytidine-3'-phosphate
  modified_base 19: mod_base = OTHER; note = 2'-O-methyladenosine-3'-phosphate
  modified_base 20: mod_base = OTHER; note = 2'-O-methyluridine-3'-phosphate
  modified_base 21: mod_base = OTHER; note = 2'-O-methylguanosine-3'-phosphorothioate
  modified_base 22: mod_base = OTHER; note = 2'-O-methylcytidine-3'-phosphorothioate
  modified_base 23: mod_base = OTHER; note = 2'-O-methylguanosine
acagttttcaatgtgcacatgcg

SEQ ID NO: 25 - RNA, 23 nt, synthetic construct
  source 1..23: mol_type = other RNA
  modified_base 5: mod_base = OTHER; note = 5'-methyluridine-3'-phosphate
  modified_base 7: mod_base = OTHER; note = 5'-methyluridine-3'-phosphate
  modified_base 13: mod_base = OTHER; note = 5'-methyluridine-3'-phosphate
  modified_base 14: mod_base = OTHER; note = 5'-methyluridine-3'-phosphate
  modified_base 21: mod_base = OTHER; note = 5'-methyluridine-3'-phosphate
  modified_base 23: mod_base = OTHER; note = 5'-methyluridine
cgcatgtgcacattgaaaactgt

SEQ ID NO: 26 - RNA, 21 nt, synthetic construct
  source 1..21: mol_type = other RNA
  modified_base 1: mod_base = OTHER; note = 2'-O-methylcytidine-3'-phosphorothioate
  modified_base 2: mod_base = OTHER; note = 2'-O-methyladenosine-3'-phosphorothioate
  modified_base 3: mod_base = OTHER; note = 2'-O-methyluridine-3'-phosphate
  modified_base 4: mod_base = OTHER; note = 2'-O-methylguanosine-3'-phosphate
  modified_base 5: mod_base = OTHER; note = 2'-O-methyluridine-3'-phosphate
  modified_base 6: mod_base = OTHER; note = 2'-O-methylguanosine-3'-phosphate
  modified_base 7: mod_base = OTHER; note = 2'-deoxy-2'-fluorocytidine-3'-phosphate
  modified_base 8: mod_base = OTHER; note = 2'-O-methyladenosine-3'-phosphate
  modified_base 9: mod_base = OTHER; note = 2'-deoxy-2'-fluorocytidine-3'-phosphate
  modified_base 10: mod_base = OTHER; note = 2'-deoxy-2'-fluoroadenosine-3'-phosphate
  modified_base 11: mod_base = OTHER; note = 2'-deoxy-2'-fluorouridine-3'-phosphate
  modified_base 12: mod_base = OTHER; note = 2'-O-methyluridine-3'-phosphate
  modified_base 13: mod_base = OTHER; note = 2'-O-methylguanosine-3'-phosphate
  modified_base 14: mod_base = OTHER; note = 2'-O-methyladenosine-3'-phosphate
  modified_base 15: mod_base = OTHER; note = 2'-O-methyladenosine-3'-phosphate
  modified_base 16: mod_base = OTHER; note = 2'-O-methyladenosine-3'-phosphate
  modified_base 17: mod_base = OTHER; note = 2'-O-methyladenosine-3'-phosphate
  modified_base 18: mod_base = OTHER; note = 2'-O-methylcytidine-3'-phosphate
  modified_base 19: mod_base = OTHER; note = 2'-O-methyluridine-3'-phosphate
  modified_base 20: mod_base = OTHER; note = 2'-O-methylguanosine-3'-phosphate
  modified_base 21: mod_base = OTHER; note = 2'-O-methyluridine-3'-phosphate ((2S,4R)-1-[29-[[2-(acetylamino)-2-deoxy-beta-D-galactopyra nosyl]oxy]-14,14-bis[[3-[[3-[[5-[[2-(acetylamino)-2-deoxy-b eta-D-galactopyranosyl]oxy]-1-oxopentyl]amino]propyl]amino] -3-oxopropoxy]methyl]-1,12,19,25-tetraoxo-16-oxa-13,20,24-t riazanonacos-1-yl]-4-hydroxy-2-pyrrolidinyl)methyl ester
catgtgcacattgaaaactgt

SEQ ID NO: 27 - RNA, 23 nt, synthetic construct
  source 1..23: mol_type = other RNA
  modified_base 1: mod_base = OTHER; note = 2'-O-methyladenosine-3'-phosphorothioate
  modified_base 2: mod_base = OTHER; note = 2'-deoxy-2'-fluorocytidine-3'-phosphorothioate
  modified_base 3: mod_base = OTHER; note = 2'-O-methyladenosine-3'-phosphate
  modified_base 4: mod_base = OTHER; note = 2'-deoxy-2'-fluoroguanosine-3'-phosphate
  modified_base 5: mod_base = OTHER; note = 2'-O-methyluridine-3'-phosphate
  modified_base 6: mod_base = OTHER; note = 2'-O-methyluridine-3'-phosphate
  modified_base 7: mod_base = OTHER; note = Thymidine-glycol nucleic acid (GNA), S-Isomer
  modified_base 8: mod_base = OTHER; note = 2'-deoxy-2'-fluorouridine-3'-phosphate
  modified_base 9: mod_base = OTHER; note = 2'-O-methylcytidine-3'-phosphate
  modified_base 10: mod_base = OTHER; note = 2'-O-methyladenosine-3'-phosphate
  modified_base 11: mod_base = OTHER; note = 2'-O-methyladenosine-3'-phosphate
  modified_base 12: mod_base = OTHER; note = 2'-deoxy-2'-fluorouridine-3'-phosphate
  modified_base 13: mod_base = OTHER; note = 2'-O-methylguanosine-3'-phosphate
  modified_base 14: mod_base = OTHER; note = 2'-deoxy-2'-fluorouridine-3'-phosphate
  modified_base 15: mod_base = OTHER; note = 2'-O-methylguanosine-3'-phosphate
  modified_base 16: mod_base = OTHER; note = 2'-deoxy-2'-fluorocytidine-3'-phosphate
  modified_base 17: mod_base = OTHER; note = 2'-O-methyladenosine-3'-phosphate
  modified_base 18: mod_base = OTHER; note = 2'-O-methylcytidine-3'-phosphate
  modified_base 19: mod_base = OTHER; note = 2'-O-methyladenosine-3'-phosphate
  modified_base 20: mod_base = OTHER; note = 2'-O-methyluridine-3'-phosphate
  modified_base 21: mod_base = OTHER; note = 2'-O-methylguanosine-3'-phosphorothioate
  modified_base 22: mod_base = OTHER; note = 2'-O-methylcytidine-3'-phosphorothioate
  modified_base 23: mod_base = OTHER; note = 2'-O-methylguanosine
acagttttcaatgtgcacatgcg

SEQ ID NO: 28 - RNA, 23 nt, synthetic construct
  source 1..23: mol_type = other RNA
  modified_base 5: mod_base = OTHER; note = 5'-methyluridine-3'-phosphate
  modified_base 7: mod_base = OTHER; note = 5'-methyluridine-3'-phosphate
  modified_base 13: mod_base = OTHER; note = 5'-methyluridine-3'-phosphate
  modified_base 14: mod_base = OTHER; note = 5'-methyluridine-3'-phosphate
  modified_base 21: mod_base = OTHER; note = 5'-methyluridine-3'-phosphate
  modified_base 23: mod_base = OTHER; note = 5'-methyluridine
cgcatgtgcacattgaaaactgt

SEQ ID NO: 29 - RNA, 21 nt, synthetic construct
  source 1..21: mol_type = other RNA
  modified_base 1: mod_base = OTHER; note = 2'-O-methyladenosine-3'-phosphorothioate
  modified_base 2: mod_base = OTHER; note = 2'-O-methyluridine-3'-phosphorothioate
  modified_base 3: mod_base = OTHER; note = 2'-O-methylguanosine-3'-phosphate
  modified_base 4: mod_base = OTHER; note = 2'-O-methylguanosine-3'-phosphate
  modified_base 5: mod_base = OTHER; note = 2'-O-methyluridine-3'-phosphate
  modified_base 6: mod_base = OTHER; note = 2'-O-methylcytidine-3'-phosphate
  modified_base 7: mod_base = OTHER; note = 2'-deoxy-2'-fluoroadenosine-3'-phosphate
  modified_base 8: mod_base = OTHER; note = 2'-O-methylguanosine-3'-phosphate
  modified_base 9: mod_base = OTHER; note = 2'-deoxy-2'-fluoroadenosine-3'-phosphate
  modified_base 10: mod_base = OTHER; note = 2'-deoxy-2'-fluorouridine-3'-phosphate
  modified_base 11: mod_base = OTHER; note = 2'-deoxy-2'-fluorocytidine-3'-phosphate
  modified_base 12: mod_base = OTHER; note = 2'-O-methyluridine-3'-phosphate
  modified_base 13: mod_base = OTHER; note = 2'-O-methyluridine-3'-phosphate
  modified_base 14: mod_base = OTHER; note = 2'-O-methylcytidine-3'-phosphate
  modified_base 15: mod_base = OTHER; note = 2'-O-methyladenosine-3'-phosphate
  modified_base 16: mod_base = OTHER; note = 2'-O-methyladenosine-3'-phosphate
  modified_base 17: mod_base = OTHER; note = 2'-O-methyladenosine-3'-phosphate
  modified_base 18: mod_base = OTHER; note = 2'-O-methyladenosine-3'-phosphate
  modified_base 19: mod_base = OTHER; note = 2'-O-methyluridine-3'-phosphate
  modified_base 20: mod_base = OTHER; note = 2'-O-methyladenosine-3'-phosphate
  modified_base 21: mod_base = OTHER; note = 2'-O-methyladenosine-3'-phosphate ((2S,4R)-1-[29-[[2-(acetylamino)-2-deoxy-beta-D-galactopyra nosyl]oxy]-14,14-bis[[3-[[3-[[5-[[2-(acetylamino)-2-deoxy-b eta-D-galactopyranosyl]oxy]-1-oxopentyl]amino]propyl]amino] -3-oxopropoxy]methyl]-1,12,19,25-tetraoxo-16-oxa-13,20,24-t riazanonacos-1-yl]-4-hydroxy-2-pyrrolidinyl)methyl ester
atggtcagatcttcaaaataa

SEQ ID NO: 30 - RNA, 23 nt, synthetic construct
  source 1..23: mol_type = other RNA
  modified_base 1: mod_base = OTHER; note = 2'-O-methyluridine-3'-phosphorothioate
  modified_base 2: mod_base = OTHER; note = 2'-deoxy-2'-fluorouridine-3'-phosphorothioate
  modified_base 3: mod_base = OTHER; note = 2'-O-methyladenosine-3'-phosphate
  modified_base 4: mod_base = OTHER; note = 2'-O-methyluridine-3'-phosphate
  modified_base 5: mod_base = OTHER; note = 2'-O-methyluridine-3'-phosphate
  modified_base 6: mod_base = OTHER; note = 2'-O-methyluridine-3'-phosphate
  modified_base 7: mod_base = OTHER; note = Thymidine-glycol nucleic acid (GNA), S-Isomer
  modified_base 8: mod_base = OTHER; note = 2'-O-methylguanosine-3'-phosphate
  modified_base 9: mod_base = OTHER; note = 2'-O-methyladenosine-3'-phosphate
  modified_base 10: mod_base = OTHER; note = 2'-O-methyladenosine-3'-phosphate
  modified_base 11: mod_base = OTHER; note = 2'-O-methylguanosine-3'-phosphate
  modified_base 12: mod_base = OTHER; note = 2'-O-methyladenosine-3'-phosphate
  modified_base 13: mod_base = OTHER; note = 2'-O-methyluridine-3'-phosphate
  modified_base 14: mod_base = OTHER; note = 2'-deoxy-2'-fluorocytidine-3'-phosphate
  modified_base 15: mod_base = OTHER; note = 2'-O-methyluridine-3'-phosphate
  modified_base 16: mod_base = OTHER; note = 2'-deoxy-2'-fluoroguanosine-3'-phosphate
  modified_base 17: mod_base = OTHER; note = 2'-O-methyladenosine-3'-phosphate
  modified_base 18: mod_base = OTHER; note = 2'-O-methylcytidine-3'-phosphate
  modified_base 19: mod_base = OTHER; note = 2'-O-methylcytidine-3'-phosphate
  modified_base 20: mod_base = OTHER; note = 2'-O-methyladenosine-3'-phosphate
  modified_base 21: mod_base = OTHER; note = 2'-O-methyluridine-3'-phosphorothioate
  modified_base 22: mod_base = OTHER; note = 2'-O-methyluridine-3'-phosphorothioate
  modified_base 23: mod_base = OTHER; note = 2'-O-methylguanosine
ttattttgaagatctgaccattg

SEQ ID NO: 31 - RNA, 23 nt, synthetic construct
  source 1..23: mol_type = other RNA
  modified_base 4: mod_base = OTHER; note = 5'-methyluridine-3'-phosphate
  modified_base 7: mod_base = OTHER; note = 5'-methyluridine-3'-phosphate
  modified_base 12: mod_base = OTHER; note = 5'-methyluridine-3'-phosphate
  modified_base 14: mod_base = OTHER; note = 5'-methyluridine-3'-phosphate
  modified_base 15: mod_base = OTHER; note = 5'-methyluridine-3'-phosphate
  modified_base 21: mod_base = OTHER; note = 5'-methyluridine-3'-phosphate
caatggtcagatcttcaaaataa

SEQ ID NO: 32 - RNA, 21 nt, synthetic construct
  source 1..21: mol_type = other RNA
  modified_base 1: mod_base = OTHER; note = 2'-O-methyladenosine-3'-phosphorothioate
  modified_base 2: mod_base = OTHER; note = 2'-O-methyluridine-3'-phosphorothioate
  modified_base 3: mod_base = OTHER; note = 2'-O-methylguanosine-3'-phosphate
  modified_base 4: mod_base = OTHER; note = 2'-O-methylguanosine-3'-phosphate
  modified_base 5: mod_base = OTHER; note = 2'-O-methyluridine-3'-phosphate
  modified_base 6: mod_base = OTHER; note = 2'-O-methylcytidine-3'-phosphate
  modified_base 7: mod_base = OTHER; note = 2'-deoxy-2'-fluoroadenosine-3'-phosphate
  modified_base 8: mod_base = OTHER; note = 2'-O-methylguanosine-3'-phosphate
  modified_base 9: mod_base = OTHER; note = 2'-deoxy-2'-fluoroadenosine-3'-phosphate
  modified_base 10: mod_base = OTHER; note = 2'-deoxy-2'-fluorouridine-3'-phosphate
  modified_base 11: mod_base = OTHER; note = 2'-deoxy-2'-fluorocytidine-3'-phosphate
  modified_base 12: mod_base = OTHER; note = 2'-O-methyluridine-3'-phosphate
  modified_base 13: mod_base = OTHER; note = 2'-O-methyluridine-3'-phosphate
  modified_base 14: mod_base = OTHER; note = 2'-O-methylcytidine-3'-phosphate
  modified_base 15: mod_base = OTHER; note = 2'-O-methyladenosine-3'-phosphate
  modified_base 16: mod_base = OTHER; note = 2'-O-methyladenosine-3'-phosphate
  modified_base 17: mod_base = OTHER; note = 2'-O-methyladenosine-3'-phosphate
  modified_base 18: mod_base = OTHER; note = 2'-O-methyladenosine-3'-phosphate
  modified_base 19: mod_base = OTHER; note = 2'-O-methyluridine-3'-phosphate
  modified_base 20: mod_base = OTHER; note = 2'-O-methyladenosine-3'-phosphate
  modified_base 21: mod_base = OTHER; note = 2'-O-methyladenosine-3'-phosphate ((2S,4R)-1-[29-[[2-(acetylamino)-2-deoxy-beta-D-galactopyra nosyl]oxy]-14,14-bis[[3-[[3-[[5-[[2-(acetylamino)-2-deoxy-b eta-D-galactopyranosyl]oxy]-1-oxopentyl]amino]propyl]amino] -3-oxopropoxy]methyl]-1,12,19,25-tetraoxo-16-oxa-13,20,24-t riazanonacos-1-yl]-4-hydroxy-2-pyrrolidinyl)methyl ester
atggtcagatcttcaaaataa

SEQ ID NO: 33 - RNA, 23 nt, synthetic construct
  source 1..23: mol_type = other RNA
  modified_base 1: mod_base = OTHER; note = 2'-O-methyluridine-3'-phosphorothioate
  modified_base 2: mod_base = OTHER; note = 2'-deoxy-2'-fluorouridine-3'-phosphorothioate
  modified_base 3: mod_base = OTHER; note = 2'-O-methyladenosine-3'-phosphate
  modified_base 4: mod_base = OTHER; note = 2'-O-methyluridine-3'-phosphate
  modified_base 5: mod_base = OTHER; note = 2'-O-methyluridine-3'-phosphate
  modified_base 6: mod_base = OTHER; note = 2'-O-methyluridine-3'-phosphate
  modified_base 7: mod_base = OTHER; note = Thymidine-glycol nucleic acid (GNA), S-Isomer
  modified_base 8: mod_base = OTHER; note = 2'-O-methylguanosine-3'-phosphate
  modified_base 9: mod_base = OTHER; note = 2'-O-methyladenosine-3'-phosphate
  modified_base 10: mod_base = OTHER; note = 2'-O-methyladenosine-3'-phosphate
  modified_base 11: mod_base = OTHER; note = 2'-O-methylguanosine-3'-phosphate
  modified_base 12: mod_base = OTHER; note = 2'-O-methyladenosine-3'-phosphate
  modified_base 13: mod_base = OTHER; note = 2'-O-methyluridine-3'-phosphate
  modified_base 14: mod_base = OTHER; note = 2'-deoxy-2'-fluorocytidine-3'-phosphate
  modified_base 15: mod_base = OTHER; note = 2'-O-methyluridine-3'-phosphate
  modified_base 16: mod_base = OTHER; note = 2'-deoxy-2'-fluoroguanosine-3'-phosphate
  modified_base 17: mod_base = OTHER; note = 2'-O-methyladenosine-3'-phosphate
  modified_base 18: mod_base = OTHER; note = 2'-O-methylcytidine-3'-phosphate
  modified_base 19: mod_base = OTHER; note = 2'-O-methylcytidine-3'-phosphate
  modified_base 20: mod_base = OTHER; note = 2'-O-methyladenosine-3'-phosphate
  modified_base 21: mod_base = OTHER; note = 2'-O-methyluridine-3'-phosphorothioate
  modified_base 22: mod_base = OTHER; note = 2'-O-methylguanosine-3'-phosphorothioate
  modified_base 23: mod_base = OTHER; note = 2'-O-methylguanosine
ttattttgaagatctgaccatgg

SEQ ID NO: 34 - RNA, 23 nt, synthetic construct
  source 1..23: mol_type = other RNA
  modified_base 4: mod_base = OTHER; note = 5'-methyluridine-3'-phosphate
  modified_base 7: mod_base = OTHER; note = 5'-methyluridine-3'-phosphate
  modified_base 12: mod_base = OTHER; note = 5'-methyluridine-3'-phosphate
  modified_base 14: mod_base = OTHER; note = 5'-methyluridine-3'-phosphate
  modified_base 15: mod_base = OTHER; note = 5'-methyluridine-3'-phosphate
  modified_base 21: mod_base = OTHER; note = 5'-methyluridine-3'-phosphate
ccatggtcagatcttcaaaataa

SEQ ID NO: 35 - RNA, 21 nt, synthetic construct
  source 1..21: mol_type = other RNA
  modified_base 1: mod_base = OTHER; note = 2'-O-methyladenosine-3'-phosphorothioate
  modified_base 2: mod_base = OTHER; note = 2'-O-methyluridine-3'-phosphorothioate
  modified_base 3: mod_base = OTHER; note = 2'-O-methylguanosine-3'-phosphate
  modified_base 4: mod_base = OTHER; note = 2'-O-methylguanosine-3'-phosphate
  modified_base 5: mod_base = OTHER; note = 2'-O-methyluridine-3'-phosphate
  modified_base 6: mod_base = OTHER; note = 2'-O-methylcytidine-3'-phosphate
  modified_base 7: mod_base = OTHER; note = 2'-deoxy-2'-fluoroadenosine-3'-phosphate
  modified_base 8: mod_base = OTHER; note = 2'-O-methylguanosine-3'-phosphate
  modified_base 9: mod_base = OTHER; note = 2'-deoxy-2'-fluoroadenosine-3'-phosphate
  modified_base 10: mod_base = OTHER; note = 2'-deoxy-2'-fluorouridine-3'-phosphate
  modified_base 11: mod_base = OTHER; note = 2'-deoxy-2'-fluorocytidine-3'-phosphate
  modified_base 12: mod_base = OTHER; note = 2'-O-methyluridine-3'-phosphate
  modified_base 13: mod_base = OTHER; note = 2'-O-methyluridine-3'-phosphate
  modified_base 14: mod_base = OTHER; note = 2'-O-methylcytidine-3'-phosphate
  modified_base 15: mod_base = OTHER; note = 2'-O-methyladenosine-3'-phosphate
  modified_base 16: mod_base = OTHER; note = 2'-O-methyladenosine-3'-phosphate
  modified_base 17: mod_base = OTHER; note = 2'-O-methyladenosine-3'-phosphate
  modified_base 18: mod_base = OTHER; note = 2'-O-methyladenosine-3'-phosphate
  modified_base 19: mod_base = OTHER; note = 2'-O-methyluridine-3'-phosphate
  modified_base 20: mod_base = OTHER; note = 2'-O-methyladenosine-3'-phosphate
  modified_base 21: mod_base = OTHER; note = 2'-O-methyladenosine-3'-phosphate ((2S,4R)-1-[29-[[2-(acetylamino)-2-deoxy-beta-D-galactopyra nosyl]oxy]-14,14-bis[[3-[[3-[[5-[[2-(acetylamino)-2-deoxy-b eta-D-galactopyranosyl]oxy]-1-oxopentyl]amino]propyl]amino] -3-oxopropoxy]methyl]-1,12,19,25-tetraoxo-16-oxa-13,20,24-t riazanonacos-1-yl]-4-hydroxy-2-pyrrolidinyl)methyl ester
atggtcagatcttcaaaataa

SEQ ID NO: 36 - RNA, 23 nt, synthetic construct
  source 1..23: mol_type = other RNA
  modified_base 1: mod_base = OTHER; note = 2'-O-methyluridine-3'-phosphorothioate
  modified_base 2: mod_base = OTHER; note = 2'-deoxy-2'-fluorouridine-3'-phosphorothioate
  modified_base 3: mod_base = OTHER; note = 2'-O-methyladenosine-3'-phosphate
  modified_base 4: mod_base = OTHER; note = 2'-O-methyluridine-3'-phosphate
  modified_base 5: mod_base = OTHER; note = 2'-O-methyluridine-3'-phosphate
  modified_base 6: mod_base = OTHER; note = 2'-O-methyluridine-3'-phosphate
  modified_base 7: mod_base = OTHER; note = Thymidine-glycol nucleic acid (GNA), S-Isomer
  modified_base 8: mod_base = OTHER; note = 2'-O-methylguanosine-3'-phosphate
  modified_base 9: mod_base = OTHER; note = 2'-O-methyladenosine-3'-phosphate
  modified_base 10: mod_base = OTHER; note = 2'-O-methyladenosine-3'-phosphate
  modified_base 11: mod_base = OTHER; note = 2'-O-methylguanosine-3'-phosphate
  modified_base 12: mod_base = OTHER; note = 2'-O-methyladenosine-3'-phosphate
  modified_base 13: mod_base = OTHER; note = 2'-O-methyluridine-3'-phosphate
  modified_base 14: mod_base = OTHER; note = 2'-deoxy-2'-fluorocytidine-3'-phosphate
  modified_base 15: mod_base = OTHER; note = 2'-O-methyluridine-3'-phosphate
  modified_base 16: mod_base = OTHER; note = 2'-deoxy-2'-fluoroguanosine-3'-phosphate
  modified_base 17: mod_base = OTHER; note = 2'-O-methyladenosine-3'-phosphate
  modified_base 18: mod_base = OTHER; note = 2'-O-methylcytidine-3'-phosphate
  modified_base 19: mod_base = OTHER; note = 2'-O-methylcytidine-3'-phosphate
  modified_base 20: mod_base = OTHER; note = 2'-O-methyladenosine-3'-phosphate
  modified_base 21: mod_base = OTHER; note = 2'-O-methyluridine-3'-phosphorothioate
  modified_base 22: mod_base = OTHER; note = 2'-O-methylguanosine-3'-phosphorothioate
  modified_base 23: mod_base = OTHER; note = 2'-O-methyluridine
ttattttgaagatctgaccatgt

SEQ ID NO: 37 - RNA, 23 nt, synthetic construct
  source 1..23: mol_type = other RNA
  modified_base 4: mod_base = OTHER; note = 5'-methyluridine-3'-phosphate
  modified_base 7: mod_base = OTHER; note = 5'-methyluridine-3'-phosphate
  modified_base 12: mod_base = OTHER; note = 5'-methyluridine-3'-phosphate
  modified_base 14: mod_base = OTHER; note = 5'-methyluridine-3'-phosphate
  modified_base 15: mod_base = OTHER; note = 5'-methyluridine-3'-phosphate
  modified_base 21: mod_base = OTHER; note = 5'-methyluridine-3'-phosphate
acatggtcagatcttcaaaataa

SEQ ID NO: 38 - RNA, 19 nt, synthetic construct
  source 1..19: mol_type = other RNA
  modified_base 1: mod_base = OTHER; note = 2'-O-methylguanosine-3'-phosphorothioate
  modified_base 2: mod_base = OTHER; note = 2'-O-methylguanosine-3'-phosphorothioate
  modified_base 3: mod_base = OTHER; note = 2'-O-methyluridine-3'-phosphate
  modified_base 4: mod_base = OTHER; note = 2'-O-methylcytidine-3'-phosphate
  modified_base 5: mod_base = OTHER; note = 2'-deoxy-2'-fluoroadenosine-3'-phosphate
  modified_base 6: mod_base = OTHER; note = 2'-O-methylguanosine-3'-phosphate
  modified_base 7: mod_base = OTHER; note = 2'-deoxy-2'-fluoroadenosine-3'-phosphate
  modified_base 8: mod_base = OTHER; note = 2'-deoxy-2'-fluorouridine-3'-phosphate
  modified_base 9: mod_base = OTHER; note = 2'-deoxy-2'-fluorocytidine-3'-phosphate
  modified_base 10: mod_base = OTHER; note = 2'-O-methyluridine-3'-phosphate
  modified_base 11: mod_base = OTHER; note = 2'-O-methyluridine-3'-phosphate
  modified_base 12: mod_base = OTHER; note = 2'-O-methylcytidine-3'-phosphate
  modified_base 13: mod_base = OTHER; note = 2'-O-methyladenosine-3'-phosphate
  modified_base 14: mod_base = OTHER; note = 2'-O-methyladenosine-3'-phosphate
  modified_base 15: mod_base = OTHER; note = 2'-O-methyladenosine-3'-phosphate
  modified_base 16: mod_base = OTHER; note = 2'-O-methyladenosine-3'-phosphate
  modified_base 17: mod_base = OTHER; note = 2'-O-methyluridine-3'-phosphate
  modified_base 18: mod_base = OTHER; note = 2'-O-methyladenosine-3'-phosphate
  modified_base 19: mod_base = OTHER; note = 2'-O-methyladenosine-3'-phosphate ((2S,4R)-1-[29-[[2-(acetylamino)-2-deoxy-beta-D-galactopyra nosyl]oxy]-14,14-bis[[3-[[3-[[5-[[2-(acetylamino)-2-deoxy-b eta-D-galactopyranosyl]oxy]-1-oxopentyl]amino]propyl]amino] -3-oxopropoxy]methyl]-1,12,19,25-tetraoxo-16-oxa-13,20,24-t riazanonacos-1-yl]-4-hydroxy-2-pyrrolidinyl)methyl ester
ggtcagatcttcaaaataa

SEQ ID NO: 39 - RNA, 21 nt, synthetic construct
  source 1..21: mol_type = other RNA
  modified_base 1: mod_base = OTHER; note = 2'-O-methyluridine-3'-phosphorothioate
  modified_base 2: mod_base = OTHER; note = 2'-deoxy-2'-fluorouridine-3'-phosphorothioate
  modified_base 3: mod_base = OTHER; note = 2'-O-methyladenosine-3'-phosphate
  modified_base 4: mod_base = OTHER; note = 2'-O-methyluridine-3'-phosphate
  modified_base 5: mod_base = OTHER; note = 2'-O-methyluridine-3'-phosphate
  modified_base 6: mod_base = OTHER; note = 2'-O-methyluridine-3'-phosphate
  modified_base 7: mod_base = OTHER; note = Thymidine-glycol nucleic acid (GNA), S-Isomer
  modified_base 8: mod_base = OTHER; note = 2'-O-methylguanosine-3'-phosphate
  modified_base 9: mod_base = OTHER; note = 2'-O-methyladenosine-3'-phosphate
  modified_base 10: mod_base = OTHER; note = 2'-O-methyladenosine-3'-phosphate
  modified_base 11: mod_base = OTHER; note = 2'-O-methylguanosine-3'-phosphate
  modified_base 12: mod_base = OTHER; note = 2'-O-methyladenosine-3'-phosphate
  modified_base 13: mod_base = OTHER; note = 2'-O-methyluridine-3'-phosphate
  modified_base 14: mod_base = OTHER; note = 2'-deoxy-2'-fluorocytidine-3'-phosphate
  modified_base 15: mod_base = OTHER; note = 2'-O-methyluridine-3'-phosphate
  modified_base 16: mod_base = OTHER; note = 2'-deoxy-2'-fluoroguanosine-3'-phosphate
  modified_base 17: mod_base = OTHER; note = 2'-O-methyladenosine-3'-phosphate
  modified_base 18: mod_base = OTHER; note = 2'-O-methylcytidine-3'-phosphate
  modified_base 19: mod_base = OTHER; note = 2'-O-methylcytidine-3'-phosphorothioate
  modified_base 20: mod_base = OTHER; note = 2'-O-methyladenosine-3'-phosphorothioate
  modified_base 21: mod_base = OTHER; note = 2'-O-methyluridine
ttattttgaagatctgaccat

SEQ ID NO: 40 - RNA, 21 nt, synthetic construct
  source 1..21: mol_type = other RNA
  modified_base 2: mod_base = OTHER; note = 5'-methyluridine-3'-phosphate
  modified_base 5: mod_base = OTHER; note = 5'-methyluridine-3'-phosphate
  modified_base 10: mod_base = OTHER; note = 5'-methyluridine-3'-phosphate
  modified_base 12: mod_base = OTHER; note = 5'-methyluridine-3'-phosphate
  modified_base 13: mod_base = OTHER; note = 5'-methyluridine-3'-phosphate
  modified_base 19: mod_base = OTHER; note = 5'-methyluridine-3'-phosphate
atggtcagatcttcaaaataa

SEQ ID NO: 41 - RNA, 21 nt, synthetic construct
  source 1..21: mol_type = other RNA
  modified_base 1: mod_base = OTHER; note = 2'-O-methyladenosine-3'-phosphorothioate
  modified_base 2: mod_base = OTHER; note = 2'-O-methyluridine-3'-phosphorothioate
  modified_base 3: mod_base = OTHER; note = 2'-O-methylguanosine-3'-phosphate
  modified_base 4: mod_base = OTHER; note = 2'-O-methylguanosine-3'-phosphate
  modified_base 5: mod_base = OTHER; note = 2'-O-methyluridine-3'-phosphate
  modified_base 6: mod_base = OTHER; note = 2'-O-methylcytidine-3'-phosphate
  modified_base 7: mod_base = OTHER; note = 2'-deoxy-2'-fluoroadenosine-3'-phosphate
  modified_base 8: mod_base = OTHER; note = 2'-O-methylguanosine-3'-phosphate
  modified_base 9: mod_base = OTHER; note = 2'-deoxy-2'-fluoroadenosine-3'-phosphate
  modified_base 10: mod_base = OTHER; note = 2'-deoxy-2'-fluorouridine-3'-phosphate
  modified_base 11: mod_base = OTHER; note = 2'-deoxy-2'-fluorocytidine-3'-phosphate
  modified_base 12: mod_base = OTHER; note = 2'-O-methyluridine-3'-phosphate
  modified_base 13: mod_base = OTHER; note = 2'-O-methyluridine-3'-phosphate
  modified_base 14: mod_base = OTHER; note = 2'-O-methylcytidine-3'-phosphate
  modified_base 15: mod_base = OTHER; note = 2'-O-methyladenosine-3'-phosphate
  modified_base 16: mod_base = OTHER; note = 2'-O-methyladenosine-3'-phosphate
  modified_base 17: mod_base = OTHER; note = 2'-O-methyladenosine-3'-phosphate
  modified_base 18: mod_base = OTHER; note = 2'-O-methyladenosine-3'-phosphate
  modified_base 19: mod_base = OTHER; note = 2'-O-methyluridine-3'-phosphate
  modified_base 20: mod_base = OTHER; note = 2'-O-methyladenosine-3'-phosphate
  modified_base 21: mod_base = OTHER; note = 2'-O-methyladenosine-3'-phosphate ((2S,4R)-1-[29-[[2-(acetylamino)-2-deoxy-beta-D-galactopyra nosyl]oxy]-14,14-bis[[3-[[3-[[5-[[2-(acetylamino)-2-deoxy-b eta-D-galactopyranosyl]oxy]-1-oxopentyl]amino]propyl]amino] -3-oxopropoxy]methyl]-1,12,19,25-tetraoxo-16-oxa-13,20,24-t riazanonacos-1-yl]-4-hydroxy-2-pyrrolidinyl)methyl ester
atggtcagatcttcaaaataa

SEQ ID NO: 42 - RNA, 23 nt, synthetic construct
  source 1..23: mol_type = other RNA
  modified_base 1: mod_base = OTHER; note = 2'-O-methyluridine-3'-phosphorothioate
  modified_base 2: mod_base = OTHER; note = 2'-deoxy-2'-fluorouridine-3'-phosphorothioate
  modified_base 3: mod_base = OTHER; note = 2'-O-methyladenosine-3'-phosphate
  modified_base 4: mod_base = OTHER; note = 2'-O-methyluridine-3'-phosphate
  modified_base 5: mod_base = OTHER; note = 2'-O-methyluridine-3'-phosphate
  modified_base 6: mod_base = OTHER; note = 2'-O-methyluridine-3'-phosphate
  modified_base 7: mod_base = OTHER; note = Thymidine-glycol nucleic acid (GNA), S-Isomer
  modified_base 8: mod_base = OTHER; note = 2'-O-methylguanosine-3'-phosphate
  modified_base 9: mod_base = OTHER; note = 2'-O-methyladenosine-3'-phosphate
  modified_base 10: mod_base = OTHER; note = 2'-O-methyladenosine-3'-phosphate
  modified_base 11: mod_base = OTHER; note = 2'-O-methylguanosine-3'-phosphate
  modified_base 12: mod_base = OTHER; note = 2'-deoxy-2'-fluoroadenosine-3'-phosphate
  modified_base 13: mod_base = OTHER; note = 2'-O-methyluridine-3'-phosphate
  modified_base 14: mod_base = OTHER; note = 2'-deoxy-2'-fluorocytidine-3'-phosphate
  modified_base 15: mod_base = OTHER; note = 2'-O-methyluridine-3'-phosphate
  modified_base 16: mod_base = OTHER; note = 2'-deoxy-2'-fluoroguanosine-3'-phosphate
  modified_base 17: mod_base = OTHER; note = 2'-O-methyladenosine-3'-phosphate
  modified_base 18: mod_base = OTHER; note = 2'-O-methylcytidine-3'-phosphate
  modified_base 19: mod_base = OTHER; note = 2'-O-methylcytidine-3'-phosphate
  modified_base 20: mod_base = OTHER; note = 2'-O-methyladenosine-3'-phosphate
  modified_base 21: mod_base = OTHER; note = 2'-O-methyluridine-3'-phosphorothioate
  modified_base 22: mod_base = OTHER; note = 2'-O-methyluridine-3'-phosphorothioate
  modified_base 23: mod_base = OTHER; note = 2'-O-methylguanosine
ttattttgaagatctgaccattg

SEQ ID NO: 43 - RNA, 23 nt, synthetic construct
  source 1..23: mol_type = other RNA
  modified_base 4: mod_base = OTHER; note = 5'-methyluridine-3'-phosphate
  modified_base 7: mod_base = OTHER; note = 5'-methyluridine-3'-phosphate
  modified_base 12: mod_base = OTHER; note = 5'-methyluridine-3'-phosphate
  modified_base 14: mod_base = OTHER; note = 5'-methyluridine-3'-phosphate
  modified_base 15: mod_base = OTHER; note = 5'-methyluridine-3'-phosphate
  modified_base 21: mod_base = OTHER; note = 5'-methyluridine-3'-phosphate
caatggtcagatcttcaaaataa

SEQ ID NO: 44 - RNA, 21 nt, synthetic construct
  source 1..21: mol_type = other RNA
  modified_base 1: mod_base = OTHER; note = 2'-O-methyladenosine-3'-phosphorothioate
  modified_base 2: mod_base = OTHER; note = 2'-O-methyluridine-3'-phosphorothioate
  modified_base 3: mod_base = OTHER; note = 2'-O-methylguanosine-3'-phosphate
  modified_base 4: mod_base = OTHER; note = 2'-O-methylguanosine-3'-phosphate
  modified_base 5: mod_base = OTHER; note = 2'-O-methyluridine-3'-phosphate
  modified_base 6: mod_base = OTHER; note = 2'-O-methylcytidine-3'-phosphate
  modified_base 7: mod_base = OTHER; note = 2'-deoxy-2'-fluoroadenosine-3'-phosphate
  modified_base 8: mod_base = OTHER; note = 2'-O-methylguanosine-3'-phosphate
  modified_base 9: mod_base = OTHER; note = 2'-deoxy-2'-fluoroadenosine-3'-phosphate
  modified_base 10: mod_base = OTHER; note = 2'-deoxy-2'-fluorouridine-3'-phosphate
  modified_base 11: mod_base = OTHER; note = 2'-deoxy-2'-fluorocytidine-3'-phosphate
  modified_base 12: mod_base = OTHER; note = 2'-O-methyluridine-3'-phosphate
  modified_base 13: mod_base = OTHER; note = 2'-O-methyluridine-3'-phosphate
  modified_base 14: mod_base = OTHER; note = 2'-O-methylcytidine-3'-phosphate
  modified_base 15: mod_base = OTHER; note = 2'-O-methyladenosine-3'-phosphate
  modified_base 16: mod_base = OTHER; note = 2'-O-methyladenosine-3'-phosphate
  modified_base 17: mod_base = OTHER; note = 2'-O-methyladenosine-3'-phosphate
  modified_base 18: mod_base = OTHER; note = 2'-O-methyladenosine-3'-phosphate
  modified_base 19: mod_base = OTHER; note = 2'-O-methyluridine-3'-phosphate
  modified_base 20: mod_base = OTHER; note = 2'-O-methyladenosine-3'-phosphate
  modified_base 21: mod_base = OTHER; note = 2'-O-methyladenosine-3'-phosphate ((2S,4R)-1-[29-[[2-(acetylamino)-2-deoxy-beta-D-galactopyra nosyl]oxy]-14,14-bis[[3-[[3-[[5-[[2-(acetylamino)-2-deoxy-b eta-D-galactopyranosyl]oxy]-1-oxopentyl]amino]propyl]amino] -3-oxopropoxy]methyl]-1,12,19,25-tetraoxo-16-oxa-13,20,24-t riazanonacos-1-yl]-4-hydroxy-2-pyrrolidinyl)methyl ester
atggtcagatcttcaaaataa

SEQ ID NO: 45 - RNA, 23 nt, synthetic construct
  source 1..23: mol_type = other RNA
  modified_base 1: mod_base = OTHER; note = 2'-O-methyluridine-3'-phosphorothioate
  modified_base 2: mod_base = OTHER; note = 2'-deoxy-2'-fluorouridine-3'-phosphorothioate
  modified_base 3: mod_base = OTHER; note = 2'-O-methyladenosine-3'-phosphate
  modified_base 4: mod_base = OTHER; note = 2'-deoxy-2'-fluorouridine-3'-phosphate
  modified_base 5: mod_base = OTHER; note = 2'-O-methyluridine-3'-phosphate
  modified_base 6: mod_base = OTHER; note = 2'-O-methyluridine-3'-phosphate
  modified_base 7: mod_base = OTHER; note = Thymidine-glycol nucleic acid (GNA), S-Isomer
  modified_base 8: mod_base = OTHER; note = 2'-O-methylguanosine-3'-phosphate
  modified_base 9: mod_base = OTHER; note = 2'-O-methyladenosine-3'-phosphate
  modified_base 10: mod_base = OTHER; note = 2'-O-methyladenosine-3'-phosphate
  modified_base 11: mod_base = OTHER; note = 2'-O-methylguanosine-3'-phosphate
  modified_base 12: mod_base = OTHER; note = 2'-deoxy-2'-fluoroadenosine-3'-phosphate
  modified_base 13: mod_base = OTHER; note = 2'-O-methyluridine-3'-phosphate
  modified_base 14: mod_base = OTHER; note = 2'-deoxy-2'-fluorocytidine-3'-phosphate
  modified_base 15: mod_base = OTHER; note = 2'-O-methyluridine-3'-phosphate
  modified_base 16: mod_base = OTHER; note = 2'-deoxy-2'-fluoroguanosine-3'-phosphate
  modified_base 17: mod_base = OTHER; note = 2'-O-methyladenosine-3'-phosphate
  modified_base 18: mod_base = OTHER; note = 2'-O-methylcytidine-3'-phosphate
  modified_base 19: mod_base = OTHER; note = 2'-O-methylcytidine-3'-phosphate
  modified_base 20: mod_base = OTHER; note = 2'-O-methyladenosine-3'-phosphate
  modified_base 21: mod_base = OTHER; note = 2'-O-methyluridine-3'-phosphorothioate
  modified_base 22: mod_base = OTHER; note = 2'-O-methyluridine-3'-phosphorothioate
  modified_base 23: mod_base = OTHER; note = 2'-O-methylguanosine
ttattttgaagatctgaccattg

SEQ ID NO: 46 - RNA, 23 nt, synthetic construct
  source 1..23: mol_type = other RNA
  modified_base 4: mod_base = OTHER; note = 5'-methyluridine-3'-phosphate
  modified_base 7: mod_base = OTHER; note = 5'-methyluridine-3'-phosphate
  modified_base 12: mod_base = OTHER; note = 5'-methyluridine-3'-phosphate
  modified_base 14: mod_base = OTHER; note = 5'-methyluridine-3'-phosphate
  modified_base 15: mod_base = OTHER; note = 5'-methyluridine-3'-phosphate
  modified_base 21: mod_base = OTHER; note = 5'-methyluridine-3'-phosphate
caatggtcagatcttcaaaataa

SEQ ID NO: 47 - RNA, 21 nt, synthetic construct
  source 1..21: mol_type = other RNA
  modified_base 1: mod_base = OTHER; note = 2'-O-methyladenosine-3'-phosphorothioate
  modified_base 2: mod_base = OTHER; note = 2'-O-methyluridine-3'-phosphorothioate
  modified_base 3: mod_base = OTHER; note = 2'-O-methylguanosine-3'-phosphate
  modified_base 4: mod_base = OTHER; note = 2'-O-methylguanosine-3'-phosphate
  modified_base 5: mod_base = OTHER; note = 2'-O-methyluridine-3'-phosphate
  modified_base 6: mod_base = OTHER; note = 2'-O-methylcytidine-3'-phosphate
  modified_base 7: mod_base = OTHER; note = 2'-deoxy-2'-fluoroadenosine-3'-phosphate
  modified_base 8: mod_base = OTHER; note = 2'-O-methylguanosine-3'-phosphate
  modified_base 9: mod_base = OTHER; note = 2'-deoxy-2'-fluoroadenosine-3'-phosphate
  modified_base 10: mod_base = OTHER; note = 2'-deoxy-2'-fluorouridine-3'-phosphate
  modified_base 11: mod_base = OTHER; note = 2'-deoxy-2'-fluorocytidine-3'-phosphate
  modified_base 12: mod_base = OTHER; note = 2'-O-methyluridine-3'-phosphate
  modified_base 13: mod_base = OTHER; note = 2'-O-methyluridine-3'-phosphate
  modified_base 14: mod_base = OTHER; note = 2'-O-methylcytidine-3'-phosphate
  modified_base 15: mod_base = OTHER; note = 2'-O-methyladenosine-3'-phosphate
  modified_base 16: mod_base = OTHER; note = 2'-O-methyladenosine-3'-phosphate
  modified_base 17: mod_base = OTHER; note = 2'-O-methyladenosine-3'-phosphate
  modified_base 18: mod_base = OTHER; note = 2'-O-methyladenosine-3'-phosphate
  modified_base 19: mod_base = OTHER; note = 2'-O-methyluridine-3'-phosphate
  modified_base 20: mod_base = OTHER; note = 2'-O-methyladenosine-3'-phosphate
  modified_base 21: mod_base = OTHER; note = 2'-O-methyladenosine-3'-phosphate ((2S,4R)-1-[29-[[2-(acetylamino)-2-deoxy-beta-D-galactopyra nosyl]oxy]-14,14-bis[[3-[[3-[[5-[[2-(acetylamino)-2-deoxy-b eta-D-galactopyranosyl]oxy]-1-oxopentyl]amino]propyl]amino] -3-oxopropoxy]methyl]-1,12,19,25-tetraoxo-16-oxa-13,20,24-t riazanonacos-1-yl]-4-hydroxy-2-pyrrolidinyl)methyl ester
atggtcagatcttcaaaataa

SEQ ID NO: 48 - RNA, 23 nt, synthetic construct
  source 1..23: mol_type = other RNA
  modified_base 1: mod_base = OTHER; note = 2'-O-methyluridine-3'-phosphorothioate
  modified_base 2: mod_base = OTHER; note = 2'-deoxy-2'-fluorouridine-3'-phosphorothioate
  modified_base 3: mod_base = OTHER; note = 2'-O-methyladenosine-3'-phosphate
  modified_base 4: mod_base = OTHER; note = 2'-O-methyluridine-3'-phosphate
  modified_base 5: mod_base = OTHER; note = 2'-O-methyluridine-3'-phosphate
  modified_base 6: mod_base = OTHER; note = 2'-O-methyluridine-3'-phosphate
  modified_base 7: mod_base = OTHER; note = Thymidine-glycol nucleic acid (GNA), S-Isomer
  modified_base 8: mod_base = OTHER; note = 2'-deoxy-2'-fluoroguanosine-3'-phosphate
  modified_base 9: mod_base = OTHER; note = 2'-deoxy-2'-fluoroadenosine-3'-phosphate
  modified_base 10: mod_base = OTHER; note = 2'-O-methyladenosine-3'-phosphate
  modified_base 11: mod_base = OTHER; note = 2'-O-methylguanosine-3'-phosphate
  modified_base 12: mod_base = OTHER; note = 2'-O-methyladenosine-3'-phosphate
  modified_base 13: mod_base = OTHER; note = 2'-O-methyluridine-3'-phosphate
  modified_base 14: mod_base = OTHER; note = 2'-deoxy-2'-fluorocytidine-3'-phosphate
  modified_base 15: mod_base = OTHER; note = 2'-O-methyluridine-3'-phosphate
  modified_base 16: mod_base = OTHER; note = 2'-deoxy-2'-fluoroguanosine-3'-phosphate
  modified_base 17: mod_base = OTHER; note = 2'-O-methyladenosine-3'-phosphate
  modified_base 18: mod_base = OTHER; note = 2'-O-methylcytidine-3'-phosphate
  modified_base 19: mod_base = OTHER; note = 2'-O-methylcytidine-3'-phosphate
  modified_base 20: mod_base = OTHER; note = 2'-O-methyladenosine-3'-phosphate
  modified_base 21: mod_base = OTHER; note = 2'-O-methyluridine-3'-phosphorothioate
  modified_base 22: mod_base = OTHER; note = 2'-O-methyluridine-3'-phosphorothioate
  modified_base 23: mod_base = OTHER; note = 2'-O-methylguanosine
ttattttgaagatctgaccattg

SEQ ID NO: 49 - RNA, 23 nt, synthetic construct
  source 1..23: mol_type = other RNA
  modified_base 4: mod_base = OTHER; note = 5'-methyluridine-3'-phosphate
  modified_base 7: mod_base = OTHER; note = 5'-methyluridine-3'-phosphate
  modified_base 12: mod_base = OTHER; note = 5'-methyluridine-3'-phosphate
  modified_base 14: mod_base = OTHER; note = 5'-methyluridine-3'-phosphate
  modified_base 15: mod_base = OTHER; note = 5'-methyluridine-3'-phosphate
  modified_base 21: mod_base = OTHER; note = 5'-methyluridine-3'-phosphate
caatggtcagatcttcaaaataa

SEQ ID NO: 50 - RNA, 21 nt, synthetic construct
  source 1..21: mol_type = other RNA
  modified_base 1: mod_base = OTHER; note = 2'-O-methyladenosine-3'-phosphorothioate
  modified_base 2: mod_base = OTHER; note = 2'-O-methyluridine-3'-phosphorothioate
  modified_base 3: mod_base = OTHER; note = 2'-O-methylguanosine-3'-phosphate
  modified_base 4: mod_base = OTHER; note = 2'-O-methylguanosine-3'-phosphate
  modified_base 5: mod_base = OTHER; note = 2'-O-methyluridine-3'-phosphate
  modified_base 6: mod_base = OTHER; note = 2'-O-methylcytidine-3'-phosphate
  modified_base 7: mod_base = OTHER; note = 2'-deoxy-2'-fluoroadenosine-3'-phosphate
  modified_base 8: mod_base = OTHER; note = 2'-O-methylguanosine-3'-phosphate
  modified_base 9: mod_base = OTHER; note = 2'-deoxy-2'-fluoroadenosine-3'-phosphate
  modified_base 10: mod_base = OTHER; note = 2'-deoxy-2'-fluorouridine-3'-phosphate
  modified_base 11: mod_base = OTHER; note = 2'-deoxy-2'-fluorocytidine-3'-phosphate
  modified_base 12: mod_base = OTHER; note = 2'-O-methyluridine-3'-phosphate
  modified_base 13: mod_base = OTHER; note = 2'-O-methyluridine-3'-phosphate
  modified_base 14: mod_base = OTHER; note = 2'-O-methylcytidine-3'-phosphate
  modified_base 15: mod_base = OTHER; note = 2'-O-methyladenosine-3'-phosphate
  modified_base 16: mod_base = OTHER; note = 2'-O-methyladenosine-3'-phosphate
  modified_base 17: mod_base = OTHER; note = 2'-O-methyladenosine-3'-phosphate
  modified_base 18: mod_base = OTHER; note = 2'-O-methyladenosine-3'-phosphate
  modified_base 19: mod_base = OTHER; note = 2'-O-methyluridine-3'-phosphate
  modified_base 20: mod_base = OTHER; note = 2'-O-methyladenosine-3'-phosphate
  modified_base 21: mod_base = OTHER; note = 2'-O-methyladenosine-3'-phosphate ((2S,4R)-1-[29-[[2-(acetylamino)-2-deoxy-beta-D-galactopyra nosyl]oxy]-14,14-bis[[3-[[3-[[5-[[2-(acetylamino)-2-deoxy-b eta-D-galactopyranosyl]oxy]-1-oxopentyl]amino]propyl]amino] -3-oxopropoxy]methyl]-1,12,19,25-tetraoxo-16-oxa-13,20,24-t riazanonacos-1-yl]-4-hydroxy-2-pyrrolidinyl)methyl ester
atggtcagatcttcaaaataa

SEQ ID NO: 51 - RNA, 23 nt, synthetic construct
  source 1..23: mol_type = other RNA
  modified_base 1: mod_base = OTHER; note = 2'-O-methyluridine-3'-phosphorothioate
  modified_base 2: mod_base = OTHER; note = 2'-deoxy-2'-fluorouridine-3'-phosphorothioate
  modified_base 3: mod_base = OTHER; note = 2'-O-methyladenosine-3'-phosphate
  modified_base 4: mod_base = OTHER; note = 2'-deoxy-2'-fluorouridine-3'-phosphate
  modified_base 5: mod_base = OTHER; note = 2'-O-methyluridine-3'-phosphate
  modified_base 6: mod_base = OTHER; note = 2'-O-methyluridine-3'-phosphate
  modified_base 7: mod_base = OTHER; note = Thymidine-glycol nucleic acid (GNA), S-Isomer
  modified_base 8: mod_base = OTHER; note = 2'-deoxy-2'-fluoroguanosine-3'-phosphate
  modified_base 9: mod_base = OTHER; note = 2'-deoxy-2'-fluoroadenosine-3'-phosphate
  modified_base 10: mod_base = OTHER; note = 2'-O-methyladenosine-3'-phosphate
  modified_base 11: mod_base = OTHER; note = 2'-O-methylguanosine-3'-phosphate
  modified_base 12: mod_base = OTHER; note = 2'-deoxy-2'-fluoroadenosine-3'-phosphate
  modified_base 13: mod_base = OTHER; note = 2'-O-methyluridine-3'-phosphate
  modified_base 14: mod_base = OTHER; note = 2'-deoxy-2'-fluorocytidine-3'-phosphate
  modified_base 15: mod_base = OTHER; note = 2'-O-methyluridine-3'-phosphate
  modified_base 16: mod_base = OTHER; note = 2'-deoxy-2'-fluoroguanosine-3'-phosphate
  modified_base 17: mod_base = OTHER; note = 2'-O-methyladenosine-3'-phosphate
  modified_base 18: mod_base = OTHER; note = 2'-O-methylcytidine-3'-phosphate
  modified_base 19: mod_base = OTHER; note = 2'-O-methylcytidine-3'-phosphate
  modified_base 20: mod_base = OTHER; note = 2'-O-methyladenosine-3'-phosphate
  modified_base 21: mod_base = OTHER; note = 2'-O-methyluridine-3'-phosphorothioate
  modified_base 22: mod_base = OTHER; note = 2'-O-methyluridine-3'-phosphorothioate
  modified_base 23: mod_base = OTHER; note = 2'-O-methylguanosine
ttattttgaagatctgaccattg

SEQ ID NO: 52 - RNA, 23 nt, synthetic construct
  source 1..23: mol_type = other RNA
  modified_base 4: mod_base = OTHER; note = 5'-methyluridine-3'-phosphate
  modified_base 7: mod_base = OTHER; note = 5'-methyluridine-3'-phosphate
  modified_base 12: mod_base = OTHER; note = 5'-methyluridine-3'-phosphate
  modified_base 14: mod_base = OTHER; note = 5'-methyluridine-3'-phosphate
  modified_base 15: mod_base = OTHER; note = 5'-methyluridine-3'-phosphate
  modified_base 21: mod_base = OTHER; note = 5'-methyluridine-3'-phosphate
caatggtcagatcttcaaaataa

SEQ ID NO: 53 - RNA, 21 nt, synthetic construct
  source 1..21: mol_type = other RNA
  modified_base 1: mod_base = OTHER; note = 2'-O-methyladenosine-3'-phosphorothioate
  modified_base 2: mod_base = OTHER; note = 2'-O-methyluridine-3'-phosphorothioate
  modified_base 3: mod_base = OTHER; note = 2'-O-methylguanosine-3'-phosphate
  modified_base 4: mod_base = OTHER; note = 2'-O-methylguanosine-3'-phosphate
  modified_base 5: mod_base = OTHER; note = 2'-O-methyluridine-3'-phosphate
  modified_base 6: mod_base = OTHER; note = 2'-O-methylcytidine-3'-phosphate
  modified_base 7: mod_base = OTHER; note = 2'-deoxy-2'-fluoroadenosine-3'-phosphate
  modified_base 8: mod_base = OTHER; note = 2'-O-methylguanosine-3'-phosphate
  modified_base 9: mod_base = OTHER; note = 2'-deoxy-2'-fluoroadenosine-3'-phosphate
  modified_base 10: mod_base = OTHER; note = 2'-deoxy-2'-fluorouridine-3'-phosphate
  modified_base 11: mod_base = OTHER; note = 2'-deoxy-2'-fluorocytidine-3'-phosphate
  modified_base 12: mod_base = OTHER; note = 2'-O-methyluridine-3'-phosphate
  modified_base 13: mod_base = OTHER; note = 2'-O-methyluridine-3'-phosphate
  modified_base 14: mod_base = OTHER; note = 2'-O-methylcytidine-3'-phosphate
  modified_base 15: mod_base = OTHER; note = 2'-O-methyladenosine-3'-phosphate
  modified_base 16: mod_base = OTHER; note = 2'-O-methyladenosine-3'-phosphate
  modified_base 17: mod_base = OTHER; note = 2'-O-methyladenosine-3'-phosphate
  modified_base 18: mod_base = OTHER; note = 2'-O-methyladenosine-3'-phosphate
  modified_base 19: mod_base = OTHER; note = 2'-O-methyluridine-3'-phosphate
  modified_base 20: mod_base = OTHER; note = 2'-O-methyladenosine-3'-phosphate
  modified_base 21: mod_base = OTHER; note = 2'-O-methyladenosine-3'-phosphate ((2S,4R)-1-[29-[[2-(acetylamino)-2-deoxy-beta-D-galactopyra nosyl]oxy]-14,14-bis[[3-[[3-[[5-[[2-(acetylamino)-2-deoxy-b eta-D-galactopyranosyl]oxy]-1-oxopentyl]amino]propyl]amino] -3-oxopropoxy]methyl]-1,12,19,25-tetraoxo-16-oxa-13,20,24-t riazanonacos-1-yl]-4-hydroxy-2-pyrrolidinyl)methyl ester
atggtcagatcttcaaaataa

SEQ ID NO: 54 - RNA, 23 nt, synthetic construct
  source 1..23: mol_type = other RNA
  modified_base 1: mod_base = OTHER; note = 2'-O-methyluridine-3'-phosphorothioate
  modified_base 2: mod_base = OTHER; note = 2'-deoxy-2'-fluorouridine-3'-phosphorothioate
  modified_base 3: mod_base = OTHER; note = 2'-O-methyladenosine-3'-phosphate
  modified_base 4: mod_base = OTHER; note = 2'-deoxy-2'-fluorouridine-3'-phosphate
  modified_base 5: mod_base = OTHER; note = 2'-O-methyluridine-3'-phosphate
  modified_base 6: mod_base = OTHER; note = 2'-O-methyluridine-3'-phosphate
  modified_base 7: mod_base = OTHER; note = Thymidine-glycol nucleic acid (GNA), S-Isomer
  modified_base 8: mod_base = OTHER; note = 2'-deoxy-2'-fluoroguanosine-3'-phosphate
  modified_base 9: mod_base = OTHER; note = 2'-O-methyladenosine-3'-phosphate
  modified_base 10: mod_base = OTHER; note = 2'-O-methyladenosine-3'-phosphate
  modified_base 11: mod_base = OTHER; note = 2'-O-methylguanosine-3'-phosphate
  modified_base 12: mod_base = OTHER; note = 2'-deoxy-2'-fluoroadenosine-3'-phosphate
  modified_base 13: mod_base = OTHER; note = 2'-O-methyluridine-3'-phosphate
  modified_base 14: mod_base = OTHER; note = 2'-deoxy-2'-fluorocytidine-3'-phosphate
  modified_base 15: mod_base = OTHER; note = 2'-O-methyluridine-3'-phosphate
  modified_base 16: mod_base = OTHER; note = 2'-deoxy-2'-fluoroguanosine-3'-phosphate
  modified_base 17: mod_base = OTHER; note = 2'-O-methyladenosine-3'-phosphate
  modified_base 18: mod_base = OTHER; note = 2'-O-methylcytidine-3'-phosphate
  modified_base 19: mod_base = OTHER; note = 2'-O-methylcytidine-3'-phosphate
  modified_base 20: mod_base = OTHER; note = 2'-O-methyladenosine-3'-phosphate
  modified_base 21: mod_base = OTHER; note = 2'-O-methyluridine-3'-phosphorothioate
  modified_base 22: mod_base = OTHER; note = 2'-O-methyluridine-3'-phosphorothioate
  modified_base 23: mod_base = OTHER; note = 2'-O-methylguanosine
ttattttgaagatctgaccattg

SEQ ID NO: 55 - RNA, 23 nt, synthetic construct
  source 1..23: mol_type = other RNA
  modified_base 4: mod_base = OTHER; note = 5'-methyluridine-3'-phosphate
  modified_base 7: mod_base = OTHER; note = 5'-methyluridine-3'-phosphate
  modified_base 12: mod_base = OTHER; note = 5'-methyluridine-3'-phosphate
  modified_base 14: mod_base = OTHER; note = 5'-methyluridine-3'-phosphate
  modified_base 15: mod_base = OTHER; note = 5'-methyluridine-3'-phosphate
  modified_base 21: mod_base = OTHER; note = 5'-methyluridine-3'-phosphate
caatggtcagatcttcaaaataa

SEQ ID NO: 56 - RNA, 21 nt, synthetic construct
  source 1..21: mol_type = other RNA
  modified_base 1: mod_base = OTHER; note = 2'-O-methyladenosine-3'-phosphorothioate
  modified_base 2: mod_base = OTHER; note = 2'-O-methyluridine-3'-phosphorothioate
  modified_base 3: mod_base = OTHER; note = 2'-O-methylguanosine-3'-phosphate
  modified_base 4: mod_base = OTHER; note = 2'-O-methylguanosine-3'-phosphate
  modified_base 5: mod_base = OTHER; note = 2'-O-methyluridine-3'-phosphate
  modified_base 6: mod_base = OTHER; note = 2'-O-methylcytidine-3'-phosphate
  modified_base 7: mod_base = OTHER; note = 2'-deoxy-2'-fluoroadenosine-3'-phosphate
  modified_base 8: mod_base = OTHER; note = 2'-O-methylguanosine-3'-phosphate
  modified_base 9: mod_base = OTHER; note = 2'-deoxy-2'-fluoroadenosine-3'-phosphate
  modified_base 10: mod_base = OTHER; note = 2'-deoxy-2'-fluorouridine-3'-phosphate
  modified_base 11: mod_base = OTHER; note = 2'-deoxy-2'-fluorocytidine-3'-phosphate
  modified_base 12: mod_base = OTHER; note = 2'-O-methyluridine-3'-phosphate
  modified_base 13: mod_base = OTHER; note = 2'-O-methyluridine-3'-phosphate
  modified_base 14: mod_base = OTHER; note = 2'-O-methylcytidine-3'-phosphate
  modified_base 15: mod_base = OTHER; note = 2'-O-methyladenosine-3'-phosphate
  modified_base 16: mod_base = OTHER; note = 2'-O-methyladenosine-3'-phosphate
  modified_base 17: mod_base = OTHER; note = 2'-O-methyladenosine-3'-phosphate
  modified_base 18: mod_base = OTHER; note = 2'-O-methyladenosine-3'-phosphate
  modified_base 19: mod_base = OTHER; note = 2'-O-methyluridine-3'-phosphate
  modified_base 20: mod_base = OTHER; note = 2'-O-methyladenosine-3'-phosphate
  modified_base 21: mod_base = OTHER; note = 2'-O-methyluridine-3'-phosphate ((2S,4R)-1-[29-[[2-(acetylamino)-2-deoxy-beta-D-galactopyra nosyl]oxy]-14,14-bis[[3-[[3-[[5-[[2-(acetylamino)-2-deoxy-b eta-D-galactopyranosyl]oxy]-1-oxopentyl]amino]propyl]amino] -3-oxopropoxy]methyl]-1,12,19,25-tetraoxo-16-oxa-13,20,24-t riazanonacos-1-yl]-4-hydroxy-2-pyrrolidinyl)methyl ester
atggtcagatcttcaaaatat

SEQ ID NO: 57 - RNA, 23 nt, synthetic construct
  source 1..23: mol_type = other RNA
  modified_base 1: mod_base = OTHER; note = 2'-O-methyladenosine-3'-phosphorothioate
  modified_base 2: mod_base = OTHER; note = 2'-deoxy-2'-fluorouridine-3'-phosphorothioate
  modified_base 3: mod_base = OTHER; note = 2'-O-methyladenosine-3'-phosphate
  modified_base 4: mod_base = OTHER; note = 2'-O-methyluridine-3'-phosphate
  modified_base 5: mod_base = OTHER; note = 2'-O-methyluridine-3'-phosphate
  modified_base 6: mod_base = OTHER; note = 2'-O-methyluridine-3'-phosphate
  modified_base 7: mod_base = OTHER; note = Thymidine-glycol nucleic acid (GNA), S-Isomer
  modified_base 8: mod_base = OTHER; note = 2'-O-methylguanosine-3'-phosphate
  modified_base 9: mod_base = OTHER; note = 2'-O-methyladenosine-3'-phosphate
  modified_base 10: mod_base = OTHER; note = 2'-O-methyladenosine-3'-phosphate
  modified_base 11: mod_base = OTHER; note = 2'-O-methylguanosine-3'-phosphate
  modified_base 12: mod_base = OTHER; note = 2'-O-methyladenosine-3'-phosphate
  modified_base 13: mod_base = OTHER; note = 2'-O-methyluridine-3'-phosphate
  modified_base 14: mod_base = OTHER; note = 2'-deoxy-2'-fluorocytidine-3'-phosphate
  modified_base 15: mod_base = OTHER; note = 2'-O-methyluridine-3'-phosphate
  modified_base 16: mod_base = OTHER; note = 2'-deoxy-2'-fluoroguanosine-3'-phosphate
  modified_base 17: mod_base = OTHER; note = 2'-O-methyladenosine-3'-phosphate
  modified_base 18: mod_base = OTHER; note = 2'-O-methylcytidine-3'-phosphate
  modified_base 19: mod_base = OTHER; note = 2'-O-methylcytidine-3'-phosphate
  modified_base 20: mod_base = OTHER; note = 2'-O-methyladenosine-3'-phosphate
  modified_base 21: mod_base = OTHER; note = 2'-O-methyluridine-3'-phosphorothioate
  modified_base 22: mod_base = OTHER; note = 2'-O-methyluridine-3'-phosphorothioate
  modified_base 23: mod_base = OTHER; note = 2'-O-methylguanosine
atattttgaagatctgaccattg

SEQ ID NO: 58 - RNA, 23 nt, synthetic construct
  source 1..23: mol_type = other RNA
  modified_base 4: mod_base = OTHER; note = 5'-methyluridine-3'-phosphate
  modified_base 7: mod_base = OTHER; note = 5'-methyluridine-3'-phosphate
  modified_base 12: mod_base = OTHER; note = 5'-methyluridine-3'-phosphate
  modified_base 14: mod_base = OTHER; note = 5'-methyluridine-3'-phosphate
  modified_base 15: mod_base = OTHER; note = 5'-methyluridine-3'-phosphate
  modified_base 21: mod_base = OTHER; note = 5'-methyluridine-3'-phosphate
  modified_base 23: mod_base = OTHER; note = 5'-methyluridine
caatggtcagatcttcaaaatat

SEQ ID NO: 59 - RNA, 21 nt, synthetic construct
  source 1..21: mol_type = other RNA
  modified_base 1: mod_base = OTHER; note = 2'-O-methyladenosine-3'-phosphorothioate
  modified_base 2: mod_base = OTHER; note = 2'-O-methyluridine-3'-phosphorothioate
  modified_base 3: mod_base = OTHER; note = 2'-O-methylguanosine-3'-phosphate
  modified_base 4: mod_base = OTHER; note = 2'-O-methylguanosine-3'-phosphate
  modified_base 5: mod_base = OTHER; note = 2'-O-methyluridine-3'-phosphate
  modified_base 6: mod_base = OTHER; note = 2'-O-methylcytidine-3'-phosphate
  modified_base 7: mod_base = OTHER; note = 2'-deoxy-2'-fluoroadenosine-3'-phosphate
  modified_base 8: mod_base = OTHER; note = 2'-O-methylguanosine-3'-phosphate
  modified_base 9: mod_base = OTHER; note = 2'-deoxy-2'-fluoroadenosine-3'-phosphate
  modified_base 10: mod_base = OTHER; note = 2'-deoxy-2'-fluorouridine-3'-phosphate
  modified_base 11: mod_base = OTHER; note = 2'-deoxy-2'-fluorocytidine-3'-phosphate
  modified_base 12: mod_base = OTHER; note = 2'-O-methyluridine-3'-phosphate
  modified_base 13: mod_base = OTHER; note = 2'-O-methyluridine-3'-phosphate
  modified_base 14: mod_base = OTHER; note = 2'-O-methylcytidine-3'-phosphate
  modified_base 15: mod_base = OTHER; note = 2'-O-methyladenosine-3'-phosphate
  modified_base 16: mod_base = OTHER; note = 2'-O-methyladenosine-3'-phosphate
  modified_base 17: mod_base = OTHER; note = 2'-O-methyladenosine-3'-phosphate
  modified_base 18: mod_base = OTHER; note = 2'-O-methyladenosine-3'-phosphate
  modified_base 19: mod_base = OTHER; note = 2'-O-methyluridine-3'-phosphate
  modified_base 20: mod_base = OTHER; note = 2'-O-methyladenosine-3'-phosphate
  modified_base 21: mod_base = OTHER; note = 2'-O-methyluridine-3'-phosphate ((2S,4R)-1-[29-[[2-(acetylamino)-2-deoxy-beta-D-galactopyra nosyl]oxy]-14,14-bis[[3-[[3-[[5-[[2-(acetylamino)-2-deoxy-b eta-D-galactopyranosyl]oxy]-1-oxopentyl]amino]propyl]amino] -3-oxopropoxy]methyl]-1,12,19,25-tetraoxo-16-oxa-13,20,24-t riazanonacos-1-yl]-4-hydroxy-2-pyrrolidinyl)methyl ester
atggtcagatcttcaaaatat

SEQ ID NO: 60 - RNA, 23 nt, synthetic construct
  source 1..23: mol_type = other RNA
  modified_base 1: mod_base = OTHER; note = 2'-O-methyladenosine-3'-phosphorothioate
  modified_base 2: mod_base = OTHER; note = 2'-deoxy-2'-fluorouridine-3'-phosphorothioate
  modified_base 3: mod_base = OTHER; note = 2'-O-methyladenosine-3'-phosphate
  modified_base 4: mod_base = OTHER; note = 2'-O-methyluridine-3'-phosphate
  modified_base 5: mod_base = OTHER; note = 2'-O-methyluridine-3'-phosphate
  modified_base 6: mod_base = OTHER; note = 2'-O-methyluridine-3'-phosphate
  modified_base 7: mod_base = OTHER; note = Thymidine-glycol nucleic acid (GNA), S-Isomer
  modified_base 8: mod_base = OTHER; note = 2'-O-methylguanosine-3'-phosphate
  modified_base 9: mod_base = OTHER; note = 2'-O-methyladenosine-3'-phosphate
  modified_base 10: mod_base = OTHER; note = 2'-O-methyladenosine-3'-phosphate
  modified_base 11: mod_base = OTHER; note = 2'-O-methylguanosine-3'-phosphate
  modified_base 12: mod_base = OTHER; note = 2'-O-methyladenosine-3'-phosphate
  modified_base 13: mod_base = OTHER; note = 2'-O-methyluridine-3'-phosphate
  modified_base 14: mod_base = OTHER; note = 2'-deoxy-2'-fluorocytidine-3'-phosphate
  modified_base 15: mod_base = OTHER; note = 2'-O-methyluridine-3'-phosphate
  modified_base 16: mod_base = OTHER; note = 2'-deoxy-2'-fluoroguanosine-3'-phosphate
  modified_base 17: mod_base = OTHER; note = 2'-O-methyladenosine-3'-phosphate
  modified_base 18: mod_base = OTHER; note = 2'-O-methylcytidine-3'-phosphate
  modified_base 19: mod_base = OTHER; note = 2'-O-methylcytidine-3'-phosphate
  modified_base 20: mod_base = OTHER; note = 2'-O-methyladenosine-3'-phosphate
  modified_base 21: mod_base = OTHER; note = 2'-O-methyluridine-3'-phosphorothioate
  modified_base 22: mod_base = OTHER; note = 2'-O-methylguanosine-3'-phosphorothioate
  modified_base 23: mod_base = OTHER; note = 2'-O-methylguanosine
atattttgaagatctgaccatgg

SEQ ID NO: 61 - RNA, 23 nt, synthetic construct
  source 1..23: mol_type = other RNA
  modified_base 4: mod_base = OTHER; note = 5'-methyluridine-3'-phosphate
  modified_base 7: mod_base = OTHER; note = 5'-methyluridine-3'-phosphate
  modified_base 12: mod_base = OTHER; note = 5'-methyluridine-3'-phosphate
  modified_base 14: mod_base = OTHER; note = 5'-methyluridine-3'-phosphate
  modified_base 15: mod_base = OTHER; note = 5'-methyluridine-3'-phosphate
  modified_base 21: mod_base = OTHER; note = 5'-methyluridine-3'-phosphate
  modified_base 23: mod_base = OTHER; note = 5'-methyluridine
ccatggtcagatcttcaaaatat

SEQ ID NO: 62 - RNA, 21 nt, synthetic construct
  source 1..21: mol_type = other RNA
  modified_base 1: mod_base = OTHER; note = 2'-O-methyladenosine-3'-phosphorothioate
  modified_base 2: mod_base = OTHER; note = 2'-O-methyluridine-3'-phosphorothioate
  modified_base 3: mod_base = OTHER; note = 2'-O-methylguanosine-3'-phosphate
  modified_base 4: mod_base = OTHER; note = 2'-O-methylguanosine-3'-phosphate
  modified_base 5: mod_base = OTHER; note = 2'-O-methyluridine-3'-phosphate
  modified_base 6: mod_base = OTHER; note = 2'-O-methylcytidine-3'-phosphate
  modified_base 7: mod_base = OTHER; note = 2'-deoxy-2'-fluoroadenosine-3'-phosphate
  modified_base 8: mod_base = OTHER; note = 2'-O-methylguanosine-3'-phosphate
  modified_base 9: mod_base = OTHER; note = 2'-deoxy-2'-fluoroadenosine-3'-phosphate
  modified_base 10: mod_base = OTHER; note = 2'-deoxy-2'-fluorouridine-3'-phosphate
  modified_base 11: mod_base = OTHER; note = 2'-deoxy-2'-fluorocytidine-3'-phosphate
  modified_base 12: mod_base = OTHER; note = 2'-O-methyluridine-3'-phosphate
  modified_base 13: mod_base = OTHER; note = 2'-O-methyluridine-3'-phosphate
  modified_base 14: mod_base = OTHER; note = 2'-O-methylcytidine-3'-phosphate
  modified_base 15: mod_base = OTHER; note = 2'-O-methyladenosine-3'-phosphate
  modified_base 16: mod_base = OTHER; note = 2'-O-methyladenosine-3'-phosphate
  modified_base 17: mod_base = OTHER; note = 2'-O-methyladenosine-3'-phosphate
  modified_base 18: mod_base = OTHER; note = 2'-O-methyladenosine-3'-phosphate
  modified_base 19: mod_base = OTHER; note = 2'-O-methyluridine-3'-phosphate
  modified_base 20: mod_base = OTHER; note = 2'-O-methyladenosine-3'-phosphate
  modified_base 21: mod_base = OTHER; note = 2'-O-methyluridine-3'-phosphate ((2S,4R)-1-[29-[[2-(acetylamino)-2-deoxy-beta-D-galactopyra nosyl]oxy]-14,14-bis[[3-[[3-[[5-[[2-(acetylamino)-2-deoxy-b eta-D-galactopyranosyl]oxy]-1-oxopentyl]amino]propyl]amino] -3-oxopropoxy]methyl]-1,12,19,25-tetraoxo-16-oxa-13,20,24-t riazanonacos-1-yl]-4-hydroxy-2-pyrrolidinyl)methyl ester
atggtcagatcttcaaaatat

SEQ ID NO: 63 - RNA, 23 nt, synthetic construct
  source 1..23: mol_type = other RNA
  modified_base 1: mod_base = OTHER; note = 2'-O-methyladenosine-3'-phosphorothioate
  modified_base 2: mod_base = OTHER; note = 2'-deoxy-2'-fluorouridine-3'-phosphorothioate
  modified_base 3: mod_base = OTHER; note = 2'-O-methyladenosine-3'-phosphate
  modified_base 4: mod_base = OTHER; note = 2'-O-methyluridine-3'-phosphate
  modified_base 5: mod_base = OTHER; note = 2'-O-methyluridine-3'-phosphate
  modified_base 6: mod_base = OTHER; note = 2'-O-methyluridine-3'-phosphate
  modified_base 7: mod_base = OTHER; note = Thymidine-glycol nucleic acid (GNA), S-Isomer
  modified_base 8: mod_base = OTHER; note = 2'-O-methylguanosine-3'-phosphate
  modified_base 9: mod_base = OTHER; note = 2'-O-methyladenosine-3'-phosphate
  modified_base 10: mod_base = OTHER; note = 2'-O-methyladenosine-3'-phosphate
  modified_base 11: mod_base = OTHER; note = 2'-O-methylguanosine-3'-phosphate
  modified_base 12: mod_base = OTHER; note = 2'-O-methyladenosine-3'-phosphate
  modified_base 13: mod_base = OTHER; note = 2'-O-methyluridine-3'-phosphate
  modified_base 14: mod_base = OTHER; note = 2'-deoxy-2'-fluorocytidine-3'-phosphate
  modified_base 15: mod_base = OTHER; note = 2'-O-methyluridine-3'-phosphate
  modified_base 16: mod_base = OTHER; note = 2'-deoxy-2'-fluoroguanosine-3'-phosphate
  modified_base 17: mod_base = OTHER; note = 2'-O-methyladenosine-3'-phosphate
  modified_base 18: mod_base = OTHER; note = 2'-O-methylcytidine-3'-phosphate
  modified_base 19: mod_base = OTHER; note = 2'-O-methylcytidine-3'-phosphate
  modified_base 20: mod_base = OTHER; note = 2'-O-methyladenosine-3'-phosphate
  modified_base 21: mod_base = OTHER; note = 2'-O-methyluridine-3'-phosphorothioate
  modified_base 22: mod_base = OTHER; note = 2'-O-methylguanosine-3'-phosphorothioate
  modified_base 23: mod_base = OTHER; note = 2'-O-methyluridine
atattttgaagatctgaccatgt

SEQ ID NO: 64 - RNA, 23 nt, synthetic construct
  source 1..23: mol_type = other RNA
  modified_base 4: mod_base = OTHER; note = 5'-methyluridine-3'-phosphate
  modified_base 7: mod_base = OTHER; note = 5'-methyluridine-3'-phosphate
  modified_base 12: mod_base = OTHER; note = 5'-methyluridine-3'-phosphate
  modified_base 14: mod_base = OTHER; note = 5'-methyluridine-3'-phosphate
  modified_base 15: mod_base = OTHER; note = 5'-methyluridine-3'-phosphate
  modified_base 21: mod_base = OTHER; note = 5'-methyluridine-3'-phosphate
  modified_base 23: mod_base = OTHER; note = 5'-methyluridine
acatggtcagatcttcaaaatat

SEQ ID NO: 65 - RNA, 19 nt, synthetic construct
  source 1..19: mol_type = other RNA
  modified_base 1: mod_base = OTHER; note = 2'-O-methylguanosine-3'-phosphorothioate
  modified_base 2: mod_base = OTHER; note = 2'-O-methylguanosine-3'-phosphorothioate
  modified_base 3: mod_base = OTHER; note = 2'-O-methyluridine-3'-phosphate
  modified_base 4: mod_base = OTHER; note = 2'-O-methylcytidine-3'-phosphate
  modified_base 5: mod_base = OTHER; note = 2'-deoxy-2'-fluoroadenosine-3'-phosphate
  modified_base 6: mod_base = OTHER; note = 2'-O-methylguanosine-3'-phosphate
  modified_base 7: mod_base = OTHER; note = 2'-deoxy-2'-fluoroadenosine-3'-phosphate
  modified_base 8: mod_base = OTHER; note = 2'-deoxy-2'-fluorouridine-3'-phosphate
  modified_base 9: mod_base = OTHER; note = 2'-deoxy-2'-fluorocytidine-3'-phosphate
  modified_base 10: mod_base = OTHER; note = 2'-O-methyluridine-3'-phosphate
  modified_base 11: mod_base = OTHER; note = 2'-O-methyluridine-3'-phosphate
  modified_base 12: mod_base = OTHER; note = 2'-O-methylcytidine-3'-phosphate
  modified_base 13: mod_base = OTHER; note = 2'-O-methyladenosine-3'-phosphate
  modified_base 14: mod_base = OTHER; note = 2'-O-methyladenosine-3'-phosphate
  modified_base 15: mod_base = OTHER; note = 2'-O-methyladenosine-3'-phosphate
  modified_base 16: mod_base = OTHER; note = 2'-O-methyladenosine-3'-phosphate
  modified_base 17: mod_base = OTHER; note = 2'-O-methyluridine-3'-phosphate
  modified_base 18: mod_base = OTHER; note = 2'-O-methyladenosine-3'-phosphate
  modified_base 19: mod_base = OTHER; note = 2'-O-methyluridine-3'-phosphate ((2S,4R)-1-[29-[[2-(acetylamino)-2-deoxy-beta-D-galactopyra nosyl]oxy]-14,14-bis[[3-[[3-[[5-[[2-(acetylamino)-2-deoxy-b eta-D-galactopyranosyl]oxy]-1-oxopentyl]amino]propyl]amino] -3-oxopropoxy]methyl]-1,12,19,25-tetraoxo-16-oxa-13,20,24-t riazanonacos-1-yl]-4-hydroxy-2-pyrrolidinyl)methyl ester
ggtcagatcttcaaaatat

SEQ ID NO: 66 - RNA, 21 nt, synthetic construct
  source 1..21: mol_type = other RNA
  modified_base 1: mod_base = OTHER; note = 2'-O-methyladenosine-3'-phosphorothioate
  modified_base 2: mod_base = OTHER; note = 2'-deoxy-2'-fluorouridine-3'-phosphorothioate
  modified_base 3: mod_base = OTHER; note = 2'-O-methyladenosine-3'-phosphate
  modified_base 4: mod_base = OTHER; note = 2'-O-methyluridine-3'-phosphate
  modified_base 5: mod_base = OTHER; note = 2'-O-methyluridine-3'-phosphate
  modified_base 6: mod_base = OTHER; note = 2'-O-methyluridine-3'-phosphate
  modified_base 7: mod_base = OTHER; note = Thymidine-glycol nucleic acid (GNA), S-Isomer
  modified_base 8: mod_base = OTHER; note = 2'-O-methylguanosine-3'-phosphate
  modified_base 9: mod_base = OTHER; note = 2'-O-methyladenosine-3'-phosphate
  modified_base 10: mod_base = OTHER; note = 2'-O-methyladenosine-3'-phosphate
  modified_base 11: mod_base = OTHER; note = 2'-O-methylguanosine-3'-phosphate
  modified_base 12: mod_base = OTHER; note = 2'-O-methyladenosine-3'-phosphate
  modified_base 13: mod_base = OTHER; note = 2'-O-methyluridine-3'-phosphate
  modified_base 14: mod_base = OTHER; note = 2'-deoxy-2'-fluorocytidine-3'-phosphate
  modified_base 15: mod_base = OTHER; note = 2'-O-methyluridine-3'-phosphate
  modified_base 16: mod_base = OTHER; note = 2'-deoxy-2'-fluoroguanosine-3'-phosphate
  modified_base 17: mod_base = OTHER; note = 2'-O-methyladenosine-3'-phosphate
  modified_base 18: mod_base = OTHER; note = 2'-O-methylcytidine-3'-phosphate
  modified_base 19: mod_base = OTHER; note = 2'-O-methylcytidine-3'-phosphorothioate
  modified_base 20: mod_base = OTHER; note = 2'-O-methyladenosine-3'-phosphorothioate
  modified_base 21: mod_base = OTHER; note = 2'-O-methyluridine
atattttgaagatctgaccat

SEQ ID NO: 67 - RNA, 21 nt, synthetic construct
  source 1..21: mol_type = other RNA
  modified_base 2: mod_base = OTHER; note = 5'-methyluridine-3'-phosphate
  modified_base 5: mod_base = OTHER; note = 5'-methyluridine-3'-phosphate
  modified_base 10: mod_base = OTHER; note = 5'-methyluridine-3'-phosphate
  modified_base 12: mod_base = OTHER; note = 5'-methyluridine-3'-phosphate
  modified_base 13: mod_base = OTHER; note = 5'-methyluridine-3'-phosphate
  modified_base 19: mod_base = OTHER; note = 5'-methyluridine-3'-phosphate
  modified_base 21: mod_base = OTHER; note = 5'-methyluridine
atggtcagatcttcaaaatat

SEQ ID NO: 68 - RNA, 21 nt, synthetic construct
  source 1..21: mol_type = other RNA
  modified_base 1: mod_base = OTHER; note = 2'-O-methyladenosine-3'-phosphorothioate
  modified_base 2: mod_base = OTHER; note = 2'-O-methyluridine-3'-phosphorothioate
  modified_base 3: mod_base = OTHER; note = 2'-O-methylguanosine-3'-phosphate
  modified_base 4: mod_base = OTHER; note = 2'-O-methylguanosine-3'-phosphate
  modified_base 5: mod_base = OTHER; note = 2'-O-methyluridine-3'-phosphate
  modified_base 6: mod_base = OTHER; note = 2'-O-methylcytidine-3'-phosphate
  modified_base 7: mod_base = OTHER; note = 2'-deoxy-2'-fluoroadenosine-3'-phosphate
  modified_base 8: mod_base = OTHER; note = 2'-O-methylguanosine-3'-phosphate
  modified_base 9: mod_base = OTHER; note = 2'-deoxy-2'-fluoroadenosine-3'-phosphate
  modified_base 10: mod_base = OTHER; note = 2'-deoxy-2'-fluorouridine-3'-phosphate
  modified_base 11: mod_base = OTHER; note = 2'-deoxy-2'-fluorocytidine-3'-phosphate
  modified_base 12: mod_base = OTHER; note = 2'-O-methyluridine-3'-phosphate
  modified_base 13: mod_base = OTHER; note = 2'-O-methyluridine-3'-phosphate
  modified_base 14: mod_base = OTHER; note = 2'-O-methylcytidine-3'-phosphate
  modified_base 15: mod_base = OTHER; note = 2'-O-methyladenosine-3'-phosphate
  modified_base 16: mod_base = OTHER; note = 2'-O-methyladenosine-3'-phosphate
  modified_base 17: mod_base = OTHER; note = 2'-O-methyladenosine-3'-phosphate
  modified_base 18: mod_base = OTHER; note = 2'-O-methyladenosine-3'-phosphate
  modified_base 19: mod_base = OTHER; note = 2'-O-methyluridine-3'-phosphate
  modified_base 20: mod_base = OTHER; note = 2'-O-methyladenosine-3'-phosphate
  modified_base 21: mod_base = OTHER; note = 2'-O-methyluridine-3'-phosphate ((2S,4R)-1-[29-[[2-(acetylamino)-2-deoxy-beta-D-galactopyra nosyl]oxy]-14,14-bis[[3-[[3-[[5-[[2-(acetylamino)-2-deoxy-b eta-D-galactopyranosyl]oxy]-1-oxopentyl]amino]propyl]amino] -3-oxopropoxy]methyl]-1,12,19,25-tetraoxo-16-oxa-13,20,24-t riazanonacos-1-yl]-4-hydroxy-2-pyrrolidinyl)methyl ester
atggtcagatcttcaaaatat

SEQ ID NO: 69 - RNA, 23 nt, synthetic construct
  source 1..23: mol_type = other RNA
  modified_base 1: mod_base = OTHER; note = 2'-O-methyladenosine-3'-phosphorothioate
  modified_base 2: mod_base = OTHER; note = 2'-deoxy-2'-fluorouridine-3'-phosphorothioate
  modified_base 3: mod_base = OTHER; note = 2'-O-methyladenosine-3'-phosphate
  modified_base 4: mod_base = OTHER; note = 2'-O-methyluridine-3'-phosphate
  modified_base 5: mod_base = OTHER; note = 2'-O-methyluridine-3'-phosphate
  modified_base 6: mod_base = OTHER; note = 2'-O-methyluridine-3'-phosphate
  modified_base 7: mod_base = OTHER; note = Thymidine-glycol nucleic acid (GNA), S-Isomer
  modified_base 8: mod_base = OTHER; note = 2'-O-methylguanosine-3'-phosphate
  modified_base 9: mod_base = OTHER; note = 2'-O-methyladenosine-3'-phosphate
  modified_base 10: mod_base = OTHER; note = 2'-O-methyladenosine-3'-phosphate
  modified_base 11: mod_base = OTHER; note = 2'-O-methylguanosine-3'-phosphate
  modified_base 12: mod_base = OTHER; note = 2'-deoxy-2'-fluoroadenosine-3'-phosphate
  modified_base 13: mod_base = OTHER; note = 2'-O-methyluridine-3'-phosphate
  modified_base 14: mod_base = OTHER; note = 2'-deoxy-2'-fluorocytidine-3'-phosphate
  modified_base 15: mod_base = OTHER; note = 2'-O-methyluridine-3'-phosphate
  modified_base 16: mod_base = OTHER; note = 2'-deoxy-2'-fluoroguanosine-3'-phosphate
  modified_base 17: mod_base = OTHER; note = 2'-O-methyladenosine-3'-phosphate
  modified_base 18: mod_base = OTHER; note = 2'-O-methylcytidine-3'-phosphate
  modified_base 19: mod_base = OTHER; note = 2'-O-methylcytidine-3'-phosphate
  modified_base 20: mod_base = OTHER; note = 2'-O-methyladenosine-3'-phosphate
  modified_base 21: mod_base = OTHER; note = 2'-O-methyluridine-3'-phosphorothioate
  modified_base 22: mod_base = OTHER; note = 2'-O-methyluridine-3'-phosphorothioate
  modified_base 23: mod_base = OTHER; note = 2'-O-methylguanosine
atattttgaagatctgaccattg

SEQ ID NO: 70 - RNA, 23 nt, synthetic construct
  source 1..23: mol_type = other RNA
  modified_base 4: mod_base = OTHER; note = 5'-methyluridine-3'-phosphate
  modified_base 7: mod_base = OTHER; note = 5'-methyluridine-3'-phosphate
  modified_base 12: mod_base = OTHER; note = 5'-methyluridine-3'-phosphate
  modified_base 14: mod_base = OTHER; note = 5'-methyluridine-3'-phosphate
  modified_base 15: mod_base = OTHER; note = 5'-methyluridine-3'-phosphate
  modified_base 21: mod_base = OTHER; note = 5'-methyluridine-3'-phosphate
  modified_base 23: mod_base = OTHER; note = 5'-methyluridine
caatggtcagatcttcaaaatat

SEQ ID NO: 71 - RNA, 21 nt, synthetic construct
  source 1..21: mol_type = other RNA
  modified_base 1: mod_base = OTHER; note = 2'-O-methyladenosine-3'-phosphorothioate
  modified_base 2: mod_base = OTHER; note = 2'-O-methyluridine-3'-phosphorothioate
  modified_base 3: mod_base = OTHER; note = 2'-O-methylguanosine-3'-phosphate
  modified_base 4: mod_base = OTHER; note = 2'-O-methylguanosine-3'-phosphate
  modified_base 5: mod_base = OTHER; note = 2'-O-methyluridine-3'-phosphate
  modified_base 6: mod_base = OTHER; note = 2'-O-methylcytidine-3'-phosphate
  modified_base 7: mod_base = OTHER; note = 2'-deoxy-2'-fluoroadenosine-3'-phosphate
  modified_base 8: mod_base = OTHER; note = 2'-O-methylguanosine-3'-phosphate
  modified_base 9: mod_base = OTHER; note = 2'-deoxy-2'-fluoroadenosine-3'-phosphate
  modified_base 10: mod_base = OTHER; note = 2'-deoxy-2'-fluorouridine-3'-phosphate
  modified_base 11: mod_base = OTHER; note = 2'-deoxy-2'-fluorocytidine-3'-phosphate
  modified_base 12: mod_base = OTHER; note = 2'-O-methyluridine-3'-phosphate
  modified_base 13: mod_base = OTHER; note = 2'-O-methyluridine-3'-phosphate
  modified_base 14: mod_base = OTHER; note = 2'-O-methylcytidine-3'-phosphate
  modified_base 15: mod_base = OTHER; note = 2'-O-methyladenosine-3'-phosphate
  modified_base 16: mod_base = OTHER; note = 2'-O-methyladenosine-3'-phosphate
  modified_base 17: mod_base = OTHER; note = 2'-O-methyladenosine-3'-phosphate
  modified_base 18: mod_base = OTHER; note = 2'-O-methyladenosine-3'-phosphate
  modified_base 19: mod_base = OTHER; note = 2'-O-methyluridine-3'-phosphate
  modified_base 20: mod_base = OTHER; note = 2'-O-methyladenosine-3'-phosphate
  modified_base 21: mod_base = OTHER; note = 2'-O-methyluridine-3'-phosphate ((2S,4R)-1-[29-[[2-(acetylamino)-2-deoxy-beta-D-galactopyra nosyl]oxy]-14,14-bis[[3-[[3-[[5-[[2-(acetylamino)-2-deoxy-b eta-D-galactopyranosyl]oxy]-1-oxopentyl]amino]propyl]amino] -3-oxopropoxy]methyl]-1,12,19,25-tetraoxo-16-oxa-13,20,24-t riazanonacos-1-yl]-4-hydroxy-2-pyrrolidinyl)methyl ester
atggtcagatcttcaaaatat

SEQ ID NO: 72 - RNA, 23 nt, synthetic construct
  source 1..23: mol_type = other RNA
  modified_base 1: mod_base = OTHER; note = 2'-O-methyladenosine-3'-phosphorothioate
  modified_base 2: mod_base = OTHER; note = 2'-deoxy-2'-fluorouridine-3'-phosphorothioate
  modified_base 3: mod_base = OTHER; note = 2'-O-methyladenosine-3'-phosphate
  modified_base 4: mod_base = OTHER; note = 2'-deoxy-2'-fluorouridine-3'-phosphate
  modified_base 5: mod_base = OTHER; note = 2'-O-methyluridine-3'-phosphate
  modified_base 6: mod_base = OTHER; note = 2'-O-methyluridine-3'-phosphate
  modified_base 7: mod_base = OTHER; note = Thymidine-glycol nucleic acid (GNA), S-Isomer
  modified_base 8: mod_base = OTHER; note = 2'-O-methylguanosine-3'-phosphate
  modified_base 9: mod_base = OTHER; note = 2'-O-methyladenosine-3'-phosphate
  modified_base 10: mod_base = OTHER; note = 2'-O-methyladenosine-3'-phosphate
  modified_base 11: mod_base = OTHER; note = 2'-O-methylguanosine-3'-phosphate
  modified_base 12: mod_base = OTHER; note = 2'-deoxy-2'-fluoroadenosine-3'-phosphate
  modified_base 13: mod_base = OTHER; note = 2'-O-methyluridine-3'-phosphate
  modified_base 14: mod_base = OTHER; note = 2'-deoxy-2'-fluorocytidine-3'-phosphate
  modified_base 15: mod_base = OTHER; note = 2'-O-methyluridine-3'-phosphate
  modified_base 16: mod_base = OTHER; note = 2'-deoxy-2'-fluoroguanosine-3'-phosphate
  modified_base 17: mod_base = OTHER; note = 2'-O-methyladenosine-3'-phosphate
  modified_base 18: mod_base = OTHER; note = 2'-O-methylcytidine-3'-phosphate
  modified_base 19: mod_base = OTHER; note = 2'-O-methylcytidine-3'-phosphate
  modified_base 20: mod_base = OTHER; note = 2'-O-methyladenosine-3'-phosphate
  modified_base 21: mod_base = OTHER; note = 2'-O-methyluridine-3'-phosphorothioate
  modified_base 22: mod_base = OTHER; note = 2'-O-methyluridine-3'-phosphorothioate
  modified_base 23: mod_base = OTHER; note = 2'-O-methylguanosine
atattttgaagatctgaccattg

SEQ ID NO: 73 - RNA, 23 nt, synthetic construct
  source 1..23: mol_type = other RNA
  modified_base 4: mod_base = OTHER; note = 5'-methyluridine-3'-phosphate
  modified_base 7: mod_base = OTHER; note = 5'-methyluridine-3'-phosphate
  modified_base 12: mod_base = OTHER; note = 5'-methyluridine-3'-phosphate
  modified_base 14: mod_base = OTHER; note = 5'-methyluridine-3'-phosphate
  modified_base 15: mod_base = OTHER; note = 5'-methyluridine-3'-phosphate
  modified_base 21: mod_base = OTHER; note = 5'-methyluridine-3'-phosphate
  modified_base 23: mod_base = OTHER; note = 5'-methyluridine
caatggtcagatcttcaaaatat

SEQ ID NO: 74 - RNA, 21 nt, synthetic construct
  source 1..21: mol_type = other RNA
  modified_base 1: mod_base = OTHER; note = 2'-O-methyladenosine-3'-phosphorothioate
  modified_base 2: mod_base = OTHER; note = 2'-O-methyluridine-3'-phosphorothioate
  modified_base 3: mod_base = OTHER; note = 2'-O-methylguanosine-3'-phosphate
  modified_base 4: mod_base = OTHER; note = 2'-O-methylguanosine-3'-phosphate
  modified_base 5: mod_base = OTHER; note = 2'-O-methyluridine-3'-phosphate
  modified_base 6: mod_base = OTHER; note = 2'-O-methylcytidine-3'-phosphate
  modified_base 7: mod_base = OTHER; note = 2'-deoxy-2'-fluoroadenosine-3'-phosphate
  modified_base 8: mod_base = OTHER; note = 2'-O-methylguanosine-3'-phosphate
  modified_base 9: mod_base = OTHER; note = 2'-deoxy-2'-fluoroadenosine-3'-phosphate
  modified_base 10: mod_base = OTHER; note = 2'-deoxy-2'-fluorouridine-3'-phosphate
  modified_base 11: mod_base = OTHER; note = 2'-deoxy-2'-fluorocytidine-3'-phosphate
  modified_base 12: mod_base = OTHER; note = 2'-O-methyluridine-3'-phosphate
  modified_base 13: mod_base = OTHER; note = 2'-O-methyluridine-3'-phosphate
  modified_base 14: mod_base = OTHER; note = 2'-O-methylcytidine-3'-phosphate
  modified_base 15: mod_base = OTHER; note = 2'-O-methyladenosine-3'-phosphate
  modified_base 16: mod_base = OTHER; note = 2'-O-methyladenosine-3'-phosphate
  modified_base 17: mod_base = OTHER; note = 2'-O-methyladenosine-3'-phosphate
  modified_base 18: mod_base = OTHER; note = 2'-O-methyladenosine-3'-phosphate
  modified_base 19: mod_base = OTHER; note = 2'-O-methyluridine-3'-phosphate
  modified_base 20: mod_base = OTHER; note = 2'-O-methyladenosine-3'-phosphate
  modified_base 21: mod_base = OTHER; note = 2'-O-methyluridine-3'-phosphate ((2S,4R)-1-[29-[[2-(acetylamino)-2-deoxy-beta-D-galactopyra nosyl]oxy]-14,14-bis[[3-[[3-[[5-[[2-(acetylamino)-2-deoxy-b eta-D-galactopyranosyl]oxy]-1-oxopentyl]amino]propyl]amino] -3-oxopropoxy]methyl]-1,12,19,25-tetraoxo-16-oxa-13,20,24-t riazanonacos-1-yl]-4-hydroxy-2-pyrrolidinyl)methyl ester
atggtcagatcttcaaaatat

SEQ ID NO: 75 - RNA, 23 nt, synthetic construct
  source 1..23: mol_type = other RNA
  modified_base 1: mod_base = OTHER; note = 2'-O-methyladenosine-3'-phosphorothioate
  modified_base 2: mod_base = OTHER; note = 2'-deoxy-2'-fluorouridine-3'-phosphorothioate
  modified_base 3: mod_base = OTHER; note = 2'-O-methyladenosine-3'-phosphate
  modified_base 4: mod_base = OTHER; note = 2'-O-methyluridine-3'-phosphate
  modified_base 5: mod_base = OTHER; note = 2'-O-methyluridine-3'-phosphate
  modified_base 6: mod_base = OTHER; note = 2'-O-methyluridine-3'-phosphate
  modified_base 7: mod_base = OTHER; note = Thymidine-glycol nucleic acid (GNA), S-Isomer
  modified_base 8: mod_base = OTHER; note = 2'-deoxy-2'-fluoroguanosine-3'-phosphate
  modified_base 9: mod_base = OTHER; note = 2'-deoxy-2'-fluoroadenosine-3'-phosphate
  modified_base 10: mod_base = OTHER; note = 2'-O-methyladenosine-3'-phosphate
  modified_base 11: mod_base = OTHER; note = 2'-O-methylguanosine-3'-phosphate
  modified_base 12: mod_base = OTHER; note = 2'-O-methyladenosine-3'-phosphate
  modified_base 13: mod_base = OTHER; note = 2'-O-methyluridine-3'-phosphate
  modified_base 14: mod_base = OTHER; note = 2'-deoxy-2'-fluorocytidine-3'-phosphate
  modified_base 15: mod_base = OTHER; note = 2'-O-methyluridine-3'-phosphate
  modified_base 16: mod_base = OTHER; note = 2'-deoxy-2'-fluoroguanosine-3'-phosphate
  modified_base 17: mod_base = OTHER; note = 2'-O-methyladenosine-3'-phosphate
  modified_base 18: mod_base = OTHER; note = 2'-O-methylcytidine-3'-phosphate
  modified_base 19: mod_base = OTHER; note = 2'-O-methylcytidine-3'-phosphate
  modified_base 20: mod_base = OTHER; note = 2'-O-methyladenosine-3'-phosphate
  modified_base 21: mod_base = OTHER; note = 2'-O-methyluridine-3'-phosphorothioate
  modified_base 22: mod_base = OTHER; note = 2'-O-methyluridine-3'-phosphorothioate
  modified_base 23: mod_base = OTHER; note = 2'-O-methylguanosine
atattttgaagatctgaccattg

SEQ ID NO: 76 - RNA, 23 nt, synthetic construct
  source 1..23: mol_type = other RNA
  modified_base 4: mod_base = OTHER; note = 5'-methyluridine-3'-phosphate
  modified_base 7: mod_base = OTHER; note = 5'-methyluridine-3'-phosphate
  modified_base 12: mod_base = OTHER; note = 5'-methyluridine-3'-phosphate
  modified_base 14: mod_base = OTHER; note = 5'-methyluridine-3'-phosphate
  modified_base 15: mod_base = OTHER; note = 5'-methyluridine-3'-phosphate
  modified_base 21: mod_base = OTHER; note = 5'-methyluridine-3'-phosphate
  modified_base 23: mod_base = OTHER; note = 5'-methyluridine
caatggtcagatcttcaaaatat

SEQ ID NO: 77 - RNA, 21 nt, synthetic construct
  source 1..21: mol_type = other RNA
  modified_base 1: mod_base = OTHER; note = 2'-O-methyladenosine-3'-phosphorothioate
  modified_base 2: mod_base = OTHER; note = 2'-O-methyluridine-3'-phosphorothioate
  modified_base 3: mod_base = OTHER; note = 2'-O-methylguanosine-3'-phosphate
  modified_base 4: mod_base = OTHER; note = 2'-O-methylguanosine-3'-phosphate
  modified_base 5: mod_base = OTHER; note = 2'-O-methyluridine-3'-phosphate
  modified_base 6: mod_base = OTHER; note = 2'-O-methylcytidine-3'-phosphate
  modified_base 7: mod_base = OTHER; note = 2'-deoxy-2'-fluoroadenosine-3'-phosphate
  modified_base 8: mod_base = OTHER; note = 2'-O-methylguanosine-3'-phosphate
  modified_base 9: mod_base = OTHER; note = 2'-deoxy-2'-fluoroadenosine-3'-phosphate
  modified_base 10: mod_base = OTHER; note = 2'-deoxy-2'-fluorouridine-3'-phosphate
  modified_base 11: mod_base = OTHER; note = 2'-deoxy-2'-fluorocytidine-3'-phosphate
  modified_base 12: mod_base = OTHER; note = 2'-O-methyluridine-3'-phosphate
  modified_base 13: mod_base = OTHER; note = 2'-O-methyluridine-3'-phosphate
  modified_base 14: mod_base = OTHER; note = 2'-O-methylcytidine-3'-phosphate
  modified_base 15: mod_base = OTHER; note = 2'-O-methyladenosine-3'-phosphate
  modified_base 16: mod_base = OTHER; note = 2'-O-methyladenosine-3'-phosphate
  modified_base 17: mod_base = OTHER; note = 2'-O-methyladenosine-3'-phosphate
  modified_base 18: mod_base = OTHER; note = 2'-O-methyladenosine-3'-phosphate
  modified_base 19: mod_base = OTHER; note = 2'-O-methyluridine-3'-phosphate
  modified_base 20: mod_base = OTHER; note = 2'-O-methyladenosine-3'-phosphate
  modified_base 21: mod_base = OTHER; note = 2'-O-methyluridine-3'-phosphate ((2S,4R)-1-[29-[[2-(acetylamino)-2-deoxy-beta-D-galactopyra nosyl]oxy]-14,14-bis[[3-[[3-[[5-[[2-(acetylamino)-2-deoxy-b eta-D-galactopyranosyl]oxy]-1-oxopentyl]amino]propyl]amino] -3-oxopropoxy]methyl]-1,12,19,25-tetraoxo-16-oxa-13,20,24-t riazanonacos-1-yl]-4-hydroxy-2-pyrrolidinyl)methyl ester
atggtcagatcttcaaaatat

SEQ ID NO: 78 - RNA, 23 nt, synthetic construct
  source 1..23: mol_type = other RNA
  modified_base 1: mod_base = OTHER; note = 2'-O-methyladenosine-3'-phosphorothioate
  modified_base 2: mod_base = OTHER; note = 2'-deoxy-2'-fluorouridine-3'-phosphorothioate
  modified_base 3: mod_base = OTHER; note = 2'-O-methyladenosine-3'-phosphate
  modified_base 4: mod_base = OTHER; note = 2'-deoxy-2'-fluorouridine-3'-phosphate
  modified_base 5: mod_base = OTHER; note = 2'-O-methyluridine-3'-phosphate
  modified_base 6: mod_base = OTHER; note = 2'-O-methyluridine-3'-phosphate
  modified_base 7: mod_base = OTHER; note = Thymidine-glycol nucleic acid (GNA), S-Isomer
  modified_base 8: mod_base = OTHER; note = 2'-deoxy-2'-fluoroguanosine-3'-phosphate
  modified_base 9: mod_base = OTHER; note = 2'-deoxy-2'-fluoroadenosine-3'-phosphate
  modified_base 10: mod_base = OTHER; note = 2'-O-methyladenosine-3'-phosphate
  modified_base 11: mod_base = OTHER; note = 2'-O-methylguanosine-3'-phosphate
  modified_base 12: mod_base = OTHER; note = 2'-deoxy-2'-fluoroadenosine-3'-phosphate
  modified_base 13: mod_base = OTHER; note = 2'-O-methyluridine-3'-phosphate
  modified_base 14: mod_base = OTHER; note = 2'-deoxy-2'-fluorocytidine-3'-phosphate
  modified_base 15: mod_base = OTHER; note = 2'-O-methyluridine-3'-phosphate
  modified_base 16: mod_base = OTHER; note = 2'-deoxy-2'-fluoroguanosine-3'-phosphate
  modified_base 17: mod_base = OTHER; note = 2'-O-methyladenosine-3'-phosphate
  modified_base 18: mod_base = OTHER; note = 2'-O-methylcytidine-3'-phosphate
  modified_base 19: mod_base = OTHER; note = 2'-O-methylcytidine-3'-phosphate
  modified_base 20: mod_base = OTHER; note = 2'-O-methyladenosine-3'-phosphate
  modified_base 21: mod_base = OTHER; note = 2'-O-methyluridine-3'-phosphorothioate
  modified_base 22: mod_base = OTHER; note = 2'-O-methyluridine-3'-phosphorothioate
  modified_base 23: mod_base = OTHER; note = 2'-O-methylguanosine
atattttgaagatctgaccattg

SEQ ID NO: 79 - RNA, 23 nt, synthetic construct
  source 1..23: mol_type = other RNA
  modified_base 4: mod_base = OTHER; note = 5'-methyluridine-3'-phosphate
  modified_base 7: mod_base = OTHER; note = 5'-methyluridine-3'-phosphate
  modified_base 12: mod_base = OTHER; note = 5'-methyluridine-3'-phosphate
  modified_base 14: mod_base = OTHER; note = 5'-methyluridine-3'-phosphate
  modified_base 15: mod_base = OTHER; note = 5'-methyluridine-3'-phosphate
  modified_base 21: mod_base = OTHER; note = 5'-methyluridine-3'-phosphate
  modified_base 23: mod_base = OTHER; note = 5'-methyluridine
caatggtcagatcttcaaaatat

SEQ ID NO: 80 - RNA, 21 nt, synthetic construct
  source 1..21: mol_type = other RNA
  modified_base 1: mod_base = OTHER; note = 2'-O-methyladenosine-3'-phosphorothioate
  modified_base 2: mod_base = OTHER; note = 2'-O-methyluridine-3'-phosphorothioate
  modified_base 3: mod_base = OTHER; note = 2'-O-methylguanosine-3'-phosphate
  modified_base 4: mod_base = OTHER; note = 2'-O-methylguanosine-3'-phosphate
  modified_base 5: mod_base = OTHER; note = 2'-O-methyluridine-3'-phosphate
  modified_base 6: mod_base = OTHER; note = 2'-O-methylcytidine-3'-phosphate
  modified_base 7: mod_base = OTHER; note = 2'-deoxy-2'-fluoroadenosine-3'-phosphate
  modified_base 8: mod_base = OTHER; note = 2'-O-methylguanosine-3'-phosphate
  modified_base 9: mod_base = OTHER; note = 2'-deoxy-2'-fluoroadenosine-3'-phosphate
  modified_base 10: mod_base = OTHER; note = 2'-deoxy-2'-fluorouridine-3'-phosphate
  modified_base 11: mod_base = OTHER; note = 2'-deoxy-2'-fluorocytidine-3'-phosphate
  modified_base 12: mod_base = OTHER; note = 2'-O-methyluridine-3'-phosphate
  modified_base 13: mod_base = OTHER; note = 2'-O-methyluridine-3'-phosphate
  modified_base 14: mod_base = OTHER; note = 2'-O-methylcytidine-3'-phosphate
  modified_base 15: mod_base = OTHER; note = 2'-O-methyladenosine-3'-phosphate
  modified_base 16: mod_base = OTHER; note = 2'-O-methyladenosine-3'-phosphate
  modified_base 17: mod_base = OTHER; note = 2'-O-methyladenosine-3'-phosphate
  modified_base 18: mod_base = OTHER; note = 2'-O-methyladenosine-3'-phosphate
  modified_base 19: mod_base = OTHER; note = 2'-O-methyluridine-3'-phosphate
  modified_base 20: mod_base = OTHER; note = 2'-O-methyladenosine-3'-phosphate
  modified_base 21: mod_base = OTHER; note = 2'-O-methyluridine-3'-phosphate ((2S,4R)-1-[29-[[2-(acetylamino)-2-deoxy-beta-D-galactopyra nosyl]oxy]-14,14-bis[[3-[[3-[[5-[[2-(acetylamino)-2-deoxy-b eta-D-galactopyranosyl]oxy]-1-oxopentyl]amino]propyl]amino] -3-oxopropoxy]methyl]-1,12,19,25-tetraoxo-16-oxa-13,20,24-t riazanonacos-1-yl]-4-hydroxy-2-pyrrolidinyl)methyl ester
atggtcagatcttcaaaatat

SEQ ID NO: 81 - RNA, 23 nt, synthetic construct
  source 1..23: mol_type = other RNA
  modified_base 1: mod_base = OTHER; note = 2'-O-methyladenosine-3'-phosphorothioate
  modified_base 2: mod_base = OTHER; note = 2'-deoxy-2'-fluorouridine-3'-phosphorothioate
  modified_base 3: mod_base = OTHER; note = 2'-O-methyladenosine-3'-phosphate
  modified_base 4: mod_base = OTHER; note = 2'-deoxy-2'-fluorouridine-3'-phosphate
  modified_base 5: mod_base = OTHER; note = 2'-O-methyluridine-3'-phosphate
  modified_base 6: mod_base = OTHER; note = 2'-O-methyluridine-3'-phosphate
  modified_base 7: mod_base = OTHER; note = Thymidine-glycol nucleic acid (GNA), S-Isomer
  modified_base 8: mod_base = OTHER; note = 2'-deoxy-2'-fluoroguanosine-3'-phosphate
  modified_base 9: mod_base = OTHER; note = 2'-O-methyladenosine-3'-phosphate
  modified_base 10: mod_base = OTHER; note = 2'-O-methyladenosine-3'-phosphate
  modified_base 11: mod_base = OTHER; note = 2'-O-methylguanosine-3'-phosphate
  modified_base 12: mod_base = OTHER; note = 2'-deoxy-2'-fluoroadenosine-3'-phosphate
  modified_base 13: mod_base = OTHER; note = 2'-O-methyluridine-3'-phosphate
  modified_base 14: mod_base = OTHER; note = 2'-deoxy-2'-fluorocytidine-3'-phosphate
  modified_base 15: mod_base = OTHER; note = 2'-O-methyluridine-3'-phosphate
  modified_base 16: mod_base = OTHER; note = 2'-deoxy-2'-fluoroguanosine-3'-phosphate
  modified_base 17: mod_base = OTHER; note = 2'-O-methyladenosine-3'-phosphate
  modified_base 18: mod_base = OTHER; note = 2'-O-methylcytidine-3'-phosphate
  modified_base 19: mod_base = OTHER; note = 2'-O-methylcytidine-3'-phosphate
  modified_base 20: mod_base = OTHER; note = 2'-O-methyladenosine-3'-phosphate
  modified_base 21: mod_base = OTHER; note = 2'-O-methyluridine-3'-phosphorothioate
  modified_base 22: mod_base = OTHER; note = 2'-O-methyluridine-3'-phosphorothioate
  modified_base 23: mod_base = OTHER; note = 2'-O-methylguanosine
atattttgaagatctgaccattg

SEQ ID NO: 82 - RNA, 23 nt, synthetic construct
  source 1..23: mol_type = other RNA
  modified_base 4: mod_base = OTHER; note = 5'-methyluridine-3'-phosphate
  modified_base 7: mod_base = OTHER; note = 5'-methyluridine-3'-phosphate
  modified_base 12: mod_base = OTHER; note = 5'-methyluridine-3'-phosphate
  modified_base 14: mod_base = OTHER; note = 5'-methyluridine-3'-phosphate
  modified_base 15: mod_base = OTHER; note = 5'-methyluridine-3'-phosphate
  modified_base 21: mod_base = OTHER; note = 5'-methyluridine-3'-phosphate
  modified_base 23: mod_base = OTHER; note = 5'-methyluridine
caatggtcagatcttcaaaatat

SEQ ID NO: 83 - RNA, 21 nt, synthetic construct
  source 1..21: mol_type = other RNA
  modified_base 1: mod_base = OTHER; note = 2'-O-methylguanosine-3'-phosphorothioate
  modified_base 2: mod_base = OTHER; note = 2'-O-methylguanosine-3'-phosphorothioate
  modified_base 3: mod_base = OTHER; note = 2'-O-methyluridine-3'-phosphate
  modified_base 4: mod_base = OTHER; note = 2'-O-methylcytidine-3'-phosphate
  modified_base 5: mod_base = OTHER; note = 2'-O-methyladenosine-3'-phosphate
  modified_base 6: mod_base = OTHER; note = 2'-O-methylguanosine-3'-phosphate
  modified_base 7: mod_base = OTHER; note = 2'-deoxy-2'-fluoroadenosine-3'-phosphate
  modified_base 8: mod_base = OTHER; note = 2'-O-methyluridine-3'-phosphate
  modified_base 9: mod_base = OTHER; note = 2'-deoxy-2'-fluorocytidine-3'-phosphate
  modified_base 10: mod_base = OTHER; note = 2'-deoxy-2'-fluorouridine-3'-phosphate
  modified_base 11: mod_base = OTHER; note = 2'-deoxy-2'-fluorouridine-3'-phosphate
  modified_base 12: mod_base = OTHER; note = 2'-O-methylcytidine-3'-phosphate
  modified_base 13: mod_base = OTHER; note = 2'-O-methyladenosine-3'-phosphate
  modified_base 14: mod_base = OTHER; note = 2'-O-methyladenosine-3'-phosphate
  modified_base 15: mod_base = OTHER; note = 2'-O-methyladenosine-3'-phosphate
  modified_base 16: mod_base = OTHER; note = 2'-O-methyladenosine-3'-phosphate
  modified_base 17: mod_base = OTHER; note = 2'-O-methyluridine-3'-phosphate
  modified_base 18: mod_base = OTHER; note = 2'-O-methyladenosine-3'-phosphate
  modified_base 19: mod_base = OTHER; note = 2'-O-methyladenosine-3'-phosphate
  modified_base 20: mod_base = OTHER; note = 2'-O-methyladenosine-3'-phosphate
  modified_base 21: mod_base = OTHER; note = 2'-O-methyladenosine-3'-phosphate ((2S,4R)-1-[29-[[2-(acetylamino)-2-deoxy-beta-D-galactopyra nosyl]oxy]-14,14-bis[[3-[[3-[[5-[[2-(acetylamino)-2-deoxy-b eta-D-galactopyranosyl]oxy]-1-oxopentyl]amino]propyl]amino] -3-oxopropoxy]methyl]-1,12,19,25-tetraoxo-16-oxa-13,20,24-t riazanonacos-1-yl]-4-hydroxy-2-pyrrolidinyl)methyl ester
ggtcagatcttcaaaataaaa

SEQ ID NO: 84 - RNA, 23 nt, synthetic construct
  source 1..23: mol_type = other RNA
  modified_base 1: mod_base = OTHER; note = 2'-O-methyluridine-3'-phosphorothioate
  modified_base 2: mod_base = OTHER; note = 2'-deoxy-2'-fluorouridine-3'-phosphorothioate
  modified_base 3: mod_base = OTHER; note = 2'-O-methyluridine-3'-phosphate
  modified_base 4: mod_base = OTHER; note = 2'-O-methyluridine-3'-phosphate
  modified_base 5: mod_base = OTHER; note = 2'-O-methyladenosine-3'-phosphate
  modified_base 6: mod_base = OTHER; note = 2'-deoxy-2'-fluorouridine-3'-phosphate
  modified_base 7: mod_base = OTHER; note = 2'-O-methyluridine-3'-phosphate
  modified_base 8: mod_base = OTHER; note = 2'-deoxy-2'-fluorouridine-3'-phosphate
  modified_base 9: mod_base = OTHER; note = 2'-deoxy-2'-fluorouridine-3'-phosphate
  modified_base 10: mod_base = OTHER; note = 2'-O-methylguanosine-3'-phosphate
  modified_base 11: mod_base = OTHER; note = 2'-O-methyladenosine-3'-phosphate
  modified_base 12: mod_base = OTHER; note = 2'-O-methyladenosine-3'-phosphate
  modified_base 13: mod_base = OTHER; note = 2'-O-methylguanosine-3'-phosphate
  modified_base 14: mod_base = OTHER; note = 2'-deoxy-2'-fluoroadenosine-3'-phosphate
  modified_base 15: mod_base = OTHER; note = 2'-O-methyluridine-3'-phosphate
  modified_base 16: mod_base = OTHER; note = 2'-deoxy-2'-fluorocytidine-3'-phosphate
  modified_base 17: mod_base = OTHER; note = 2'-O-methyluridine-3'-phosphate
  modified_base 18: mod_base = OTHER; note = 2'-O-methylguanosine-3'-phosphate
  modified_base 19: mod_base = OTHER; note = 2'-O-methyladenosine-3'-phosphate
  modified_base 20: mod_base = OTHER; note = 2'-O-methylcytidine-3'-phosphate
  modified_base 21: mod_base = OTHER; note = 2'-O-methylcytidine-3'-phosphorothioate
  modified_base 22: mod_base = OTHER; note = 2'-O-methyladenosine-3'-phosphorothioate
  modified_base 23: mod_base = OTHER; note = 2'-O-methyluridine
ttttattttgaagatctgaccat

SEQ ID NO: 85 - RNA, 23 nt, synthetic construct
  source 1..23: mol_type = other RNA
  modified_base 2: mod_base = OTHER; note = 5'-methyluridine-3'-phosphate
  modified_base 5: mod_base = OTHER; note = 5'-methyluridine-3'-phosphate
  modified_base 10: mod_base = OTHER; note = 5'-methyluridine-3'-phosphate
  modified_base 12: mod_base = OTHER; note = 5'-methyluridine-3'-phosphate
  modified_base 13: mod_base = OTHER; note = 5'-methyluridine-3'-phosphate
  modified_base 19: mod_base = OTHER; note = 5'-methyluridine-3'-phosphate
atggtcagatcttcaaaataaaa

SEQ ID NO: 86 - RNA, 21 nt, synthetic construct
  source 1..21: mol_type = other RNA
  modified_base 1: mod_base = OTHER; note = 2'-O-methylguanosine-3'-phosphorothioate
  modified_base 2: mod_base = OTHER; note = 2'-O-methylguanosine-3'-phosphorothioate
  modified_base 3: mod_base = OTHER; note = 2'-O-methyluridine-3'-phosphate
  modified_base 4: mod_base = OTHER; note = 2'-O-methylcytidine-3'-phosphate
  modified_base 5: mod_base = OTHER; note = 2'-O-methyladenosine-3'-phosphate
  modified_base 6: mod_base = OTHER; note = 2'-O-methylguanosine-3'-phosphate
  modified_base 7: mod_base = OTHER; note = 2'-deoxy-2'-fluoroadenosine-3'-phosphate
  modified_base 8: mod_base = OTHER; note = 2'-O-methyluridine-3'-phosphate
  modified_base 9: mod_base = OTHER; note = 2'-deoxy-2'-fluorocytidine-3'-phosphate
  modified_base 10: mod_base = OTHER; note = 2'-deoxy-2'-fluorouridine-3'-phosphate
  modified_base 11: mod_base = OTHER; note = 2'-deoxy-2'-fluorouridine-3'-phosphate
  modified_base 12: mod_base = OTHER; note = 2'-O-methylcytidine-3'-phosphate
  modified_base 13: mod_base = OTHER; note = 2'-O-methyladenosine-3'-phosphate
  modified_base 14: mod_base = OTHER; note = 2'-O-methyladenosine-3'-phosphate
  modified_base 15: mod_base = OTHER; note = 2'-O-methyladenosine-3'-phosphate
  modified_base 16: mod_base = OTHER; note = 2'-O-methyladenosine-3'-phosphate
  modified_base 17: mod_base = OTHER; note = 2'-O-methyluridine-3'-phosphate
  modified_base 18: mod_base = OTHER; note = 2'-O-methyladenosine-3'-phosphate
  modified_base 19: mod_base = OTHER; note = 2'-O-methyladenosine-3'-phosphate
  modified_base 20: mod_base = OTHER; note = 2'-O-methyladenosine-3'-phosphate
  modified_base 21: mod_base = OTHER; note = 2'-O-methyladenosine-3'-phosphate ((2S,4R)-1-[29-[[2-(acetylamino)-2-deoxy-beta-D-galactopyra nosyl]oxy]-14,14-bis[[3-[[3-[[5-[[2-(acetylamino)-2-deoxy-b eta-D-galactopyranosyl]oxy]-1-oxopentyl]amino]propyl]amino] -3-oxopropoxy]methyl]-1,12,19,25-tetraoxo-16-oxa-13,20,24-t riazanonacos-1-yl]-4-hydroxy-2-pyrrolidinyl)methyl ester
ggtcagatcttcaaaataaaa

SEQ ID NO: 87 - RNA, 23 nt, synthetic construct
  source 1..23: mol_type = other RNA
  modified_base 1: mod_base = OTHER; note = 2'-O-methyluridine-3'-phosphorothioate
  modified_base 2: mod_base = OTHER; note = 2'-deoxy-2'-fluorouridine-3'-phosphorothioate
  modified_base 3: mod_base = OTHER; note = 2'-O-methyluridine-3'-phosphate
  modified_base 4: mod_base = OTHER; note = 2'-O-methyluridine-3'-phosphate
  modified_base 5: mod_base = OTHER; note = 2'-O-methyladenosine-3'-phosphate
  modified_base 6: mod_base = OTHER; note = 2'-deoxy-2'-fluorouridine-3'-phosphate
  modified_base 7: mod_base = OTHER; note = 2'-O-methyluridine-3'-phosphate
  modified_base 8: mod_base = OTHER; note = 2'-deoxy-2'-fluorouridine-3'-phosphate
  modified_base 9: mod_base = OTHER; note = 2'-deoxy-2'-fluorouridine-3'-phosphate
  modified_base 10: mod_base = OTHER; note = 2'-O-methylguanosine-3'-phosphate
  modified_base 11: mod_base = OTHER; note = 2'-O-methyladenosine-3'-phosphate
  modified_base 12: mod_base = OTHER; note = 2'-O-methyladenosine-3'-phosphate
  modified_base 13: mod_base = OTHER; note = 2'-O-methylguanosine-3'-phosphate
  modified_base 14: mod_base = OTHER; note = 2'-deoxy-2'-fluoroadenosine-3'-phosphate
  modified_base 15: mod_base = OTHER; note = 2'-O-methyluridine-3'-phosphate
  modified_base 16: mod_base = OTHER; note = 2'-deoxy-2'-fluorocytidine-3'-phosphate
  modified_base 17: mod_base = OTHER; note = 2'-O-methyluridine-3'-phosphate
  modified_base 18: mod_base = OTHER; note = 2'-O-methylguanosine-3'-phosphate
  modified_base 19: mod_base = OTHER; note = 2'-O-methyladenosine-3'-phosphate
  modified_base 20: mod_base = OTHER; note = 2'-O-methylcytidine-3'-phosphate
  modified_base 21: mod_base = OTHER; note = 2'-O-methylcytidine-3'-phosphorothioate
  modified_base 22: mod_base = OTHER; note = 2'-O-methylguanosine-3'-phosphorothioate
  modified_base 23: mod_base = OTHER; note = 2'-O-methyluridine
ttttattttgaagatctgaccgt

SEQ ID NO: 88 - RNA, 23 nt, synthetic construct
  source 1..23: mol_type = other RNA
  modified_base 5: mod_base = OTHER; note = 5'-methyluridine-3'-phosphate
  modified_base 10: mod_base = OTHER; note = 5'-methyluridine-3'-phosphate
  modified_base 12: mod_base = OTHER; note = 5'-methyluridine-3'-phosphate
  modified_base 13: mod_base = OTHER; note = 5'-methyluridine-3'-phosphate
  modified_base 19: mod_base = OTHER; note = 5'-methyluridine-3'-phosphate
acggtcagatcttcaaaataaaa

SEQ ID NO: 89 - RNA, 21 nt, synthetic construct
  source 1..21: mol_type = other RNA
  modified_base 1: mod_base = OTHER; note = 2'-O-methylguanosine-3'-phosphorothioate
  modified_base 2: mod_base = OTHER; note = 2'-O-methylguanosine-3'-phosphorothioate
  modified_base 3: mod_base = OTHER; note = 2'-O-methyluridine-3'-phosphate
  modified_base 4: mod_base = OTHER; note = 2'-O-methylcytidine-3'-phosphate
  modified_base 5: mod_base = OTHER; note = 2'-O-methyladenosine-3'-phosphate
  modified_base 6: mod_base = OTHER; note = 2'-O-methylguanosine-3'-phosphate
  modified_base 7: mod_base = OTHER; note = 2'-deoxy-2'-fluoroadenosine-3'-phosphate
  modified_base 8: mod_base = OTHER; note = 2'-O-methyluridine-3'-phosphate
  modified_base 9: mod_base = OTHER; note = 2'-deoxy-2'-fluorocytidine-3'-phosphate
  modified_base 10: mod_base = OTHER; note = 2'-deoxy-2'-fluorouridine-3'-phosphate
  modified_base 11: mod_base = OTHER; note = 2'-deoxy-2'-fluorouridine-3'-phosphate
  modified_base 12: mod_base = OTHER; note = 2'-O-methylcytidine-3'-phosphate
  modified_base 13: mod_base = OTHER; note = 2'-O-methyladenosine-3'-phosphate
  modified_base 14: mod_base = OTHER; note = 2'-O-methyladenosine-3'-phosphate
  modified_base 15: mod_base = OTHER; note = 2'-O-methyladenosine-3'-phosphate
  modified_base 16: mod_base = OTHER; note = 2'-O-methyladenosine-3'-phosphate
  modified_base 17: mod_base = OTHER; note = 2'-O-methyluridine-3'-phosphate
  modified_base 18: mod_base = OTHER; note = 2'-O-methyladenosine-3'-phosphate
  modified_base 19: mod_base = OTHER; note = 2'-O-methyladenosine-3'-phosphate
  modified_base 20: mod_base = OTHER; note = 2'-O-methyladenosine-3'-phosphate
  modified_base 21: mod_base = OTHER; note = 2'-O-methyladenosine-3'-phosphate ((2S,4R)-1-[29-[[2-(acetylamino)-2-deoxy-beta-D-galactopyra nosyl]oxy]-14,14-bis[[3-[[3-[[5-[[2-(acetylamino)-2-deoxy-b eta-D-galactopyranosyl]oxy]-1-oxopentyl]amino]propyl]amino] -3-oxopropoxy]methyl]-1,12,19,25-tetraoxo-16-oxa-13,20,24-t riazanonacos-1-yl]-4-hydroxy-2-pyrrolidinyl)methyl ester
ggtcagatcttcaaaataaaa

SEQ ID NO: 90 - RNA, 23 nt, synthetic construct
  source 1..23: mol_type = other RNA
  modified_base 1: mod_base = OTHER; note = 2'-O-methyluridine-3'-phosphorothioate
  modified_base 2: mod_base = OTHER; note = 2'-deoxy-2'-fluorouridine-3'-phosphorothioate
  modified_base 3: mod_base = OTHER; note = 2'-O-methyluridine-3'-phosphate
  modified_base 4: mod_base = OTHER; note = 2'-O-methyluridine-3'-phosphate
  modified_base 5: mod_base = OTHER; note = 2'-O-methyladenosine-3'-phosphate
  modified_base 6: mod_base = OTHER; note = 2'-deoxy-2'-fluorouridine-3'-phosphate
  modified_base 7: mod_base = OTHER; note = 2'-O-methyluridine-3'-phosphate
  modified_base 8: mod_base = OTHER; note = 2'-deoxy-2'-fluorouridine-3'-phosphate
  modified_base 9: mod_base = OTHER; note = 2'-deoxy-2'-fluorouridine-3'-phosphate
  modified_base 10: mod_base = OTHER; note = 2'-O-methylguanosine-3'-phosphate
  modified_base 11: mod_base = OTHER; note = 2'-O-methyladenosine-3'-phosphate
  modified_base 12: mod_base = OTHER; note = 2'-O-methyladenosine-3'-phosphate
  modified_base 13: mod_base = OTHER; note = 2'-O-methylguanosine-3'-phosphate
  modified_base 14: mod_base = OTHER; note = 2'-deoxy-2'-fluoroadenosine-3'-phosphate
  modified_base 15: mod_base = OTHER; note = 2'-O-methyluridine-3'-phosphate
  modified_base 16: mod_base = OTHER; note = 2'-deoxy-2'-fluorocytidine-3'-phosphate
  modified_base 17: mod_base = OTHER; note = 2'-O-methyluridine-3'-phosphate
  modified_base 18: mod_base = OTHER; note = 2'-O-methylguanosine-3'-phosphate
  modified_base 19: mod_base = OTHER; note = 2'-O-methyladenosine-3'-phosphate
  modified_base 20: mod_base = OTHER; note = 2'-O-methylcytidine-3'-phosphate
  modified_base 21: mod_base = OTHER; note = 2'-O-methylcytidine-3'-phosphorothioate
  modified_base 22: mod_base = OTHER; note = 2'-O-methylcytidine-3'-phosphorothioate
  modified_base 23: mod_base = OTHER; note = 2'-O-methyluridine
ttttattttgaagatctgaccct

SEQ ID NO: 91 - RNA, 23 nt, synthetic construct
  source 1..23: mol_type = other RNA
  modified_base 5: mod_base = OTHER; note = 5'-methyluridine-3'-phosphate
  modified_base 10: mod_base = OTHER; note = 5'-methyluridine-3'-phosphate
  modified_base 12: mod_base = OTHER; note = 5'-methyluridine-3'-phosphate
  modified_base 13: mod_base = OTHER; note = 5'-methyluridine-3'-phosphate
  modified_base 19: mod_base = OTHER; note = 5'-methyluridine-3'-phosphate
agggtcagatcttcaaaataaaa

SEQ ID NO: 92 - RNA, 21 nt, synthetic construct
  source 1..21: mol_type = other RNA
  modified_base 1: mod_base = OTHER; note = 2'-O-methylguanosine-3'-phosphorothioate
  modified_base 2: mod_base = OTHER; note = 2'-O-methylguanosine-3'-phosphorothioate
  modified_base 3: mod_base = OTHER; note = 2'-O-methyluridine-3'-phosphate
  modified_base 4: mod_base = OTHER; note = 2'-O-methylcytidine-3'-phosphate
  modified_base 5: mod_base = OTHER; note = 2'-O-methyladenosine-3'-phosphate
  modified_base 6: mod_base = OTHER; note = 2'-O-methylguanosine-3'-phosphate
  modified_base 7: mod_base = OTHER; note = 2'-deoxy-2'-fluoroadenosine-3'-phosphate
  modified_base 8: mod_base = OTHER; note = 2'-O-methyluridine-3'-phosphate
  modified_base 9: mod_base = OTHER; note = 2'-deoxy-2'-fluorocytidine-3'-phosphate
  modified_base 10: mod_base = OTHER; note = 2'-deoxy-2'-fluorouridine-3'-phosphate
  modified_base 11: mod_base = OTHER; note = 2'-deoxy-2'-fluorouridine-3'-phosphate
  modified_base 12: mod_base = OTHER; note = 2'-O-methylcytidine-3'-phosphate
  modified_base 13: mod_base = OTHER; note = 2'-O-methyladenosine-3'-phosphate
  modified_base 14: mod_base = OTHER; note = 2'-O-methyladenosine-3'-phosphate
  modified_base 15: mod_base = OTHER; note = 2'-O-methyladenosine-3'-phosphate
  modified_base 16: mod_base = OTHER; note = 2'-O-methyladenosine-3'-phosphate
  modified_base 17: mod_base = OTHER; note = 2'-O-methyluridine-3'-phosphate
  modified_base 18: mod_base = OTHER; note = 2'-O-methyladenosine-3'-phosphate
  modified_base 19: mod_base = OTHER; note = 2'-O-methyladenosine-3'-phosphate
  modified_base 20: mod_base = OTHER; note = 2'-O-methyladenosine-3'-phosphate
  modified_base 21: mod_base = OTHER; note = 2'-O-methyladenosine-3'-phosphate ((2S,4R)-1-[29-[[2-(acetylamino)-2-deoxy-beta-D-galactopyra nosyl]oxy]-14,14-bis[[3-[[3-[[5-[[2-(acetylamino)-2-deoxy-b eta-D-galactopyranosyl]oxy]-1-oxopentyl]amino]propyl]amino] -3-oxopropoxy]methyl]-1,12,19,25-tetraoxo-16-oxa-13,20,24-t riazanonacos-1-yl]-4-hydroxy-2-pyrrolidinyl)methyl ester
ggtcagatcttcaaaataaaa

SEQ ID NO: 93 - RNA, 23 nt, synthetic construct
  source 1..23: mol_type = other RNA
  modified_base 1: mod_base = OTHER; note = 2'-O-methyluridine-3'-phosphorothioate
  modified_base 2: mod_base = OTHER; note = 2'-deoxy-2'-fluorouridine-3'-phosphorothioate
  modified_base 3: mod_base = OTHER; note = 2'-O-methyluridine-3'-phosphate
  modified_base 4: mod_base = OTHER; note = 2'-O-methyluridine-3'-phosphate
  modified_base 5: mod_base = OTHER; note = 2'-O-methyladenosine-3'-phosphate
  modified_base 6: mod_base = OTHER; note = 2'-deoxy-2'-fluorouridine-3'-phosphate
  modified_base 7: mod_base = OTHER; note = 2'-O-methyluridine-3'-phosphate
  modified_base 8: mod_base = OTHER; note = 2'-deoxy-2'-fluorouridine-3'-phosphate
  modified_base 9: mod_base = OTHER; note = 2'-deoxy-2'-fluorouridine-3'-phosphate
  modified_base 10: mod_base = OTHER; note = 2'-O-methylguanosine-3'-phosphate
  modified_base 11: mod_base = OTHER; note = 2'-O-methyladenosine-3'-phosphate
  modified_base 12: mod_base = OTHER; note = 2'-O-methyladenosine-3'-phosphate
  modified_base 13: mod_base = OTHER; note = 2'-O-methylguanosine-3'-phosphate
  modified_base 14: mod_base = OTHER; note = 2'-deoxy-2'-fluoroadenosine-3'-phosphate
  modified_base 15: mod_base = OTHER; note = 2'-O-methyluridine-3'-phosphate
  modified_base 16: mod_base = OTHER; note = 2'-deoxy-2'-fluorocytidine-3'-phosphate
  modified_base 17: mod_base = OTHER; note = 2'-O-methyluridine-3'-phosphate
  modified_base 18: mod_base = OTHER; note = 2'-O-methylguanosine-3'-phosphate
  modified_base 19: mod_base = OTHER; note = 2'-O-methyladenosine-3'-phosphate
  modified_base 20: mod_base = OTHER; note = 2'-O-methylcytidine-3'-phosphate
  modified_base 21: mod_base = OTHER; note = 2'-O-methylcytidine-3'-phosphorothioate
  modified_base 22: mod_base = OTHER; note = 2'-O-methylguanosine-3'-phosphorothioate
  modified_base 23: mod_base = OTHER; note = 2'-O-methylguanosine
ttttattttgaagatctgaccgg

SEQ ID NO: 94 - RNA, 23 nt, synthetic construct
  source 1..23: mol_type = other RNA
  modified_base 5: mod_base = OTHER; note = 5'-methyluridine-3'-phosphate
  modified_base 10: mod_base = OTHER; note = 5'-methyluridine-3'-phosphate
  modified_base 12: mod_base = OTHER; note = 5'-methyluridine-3'-phosphate
  modified_base 13: mod_base = OTHER; note = 5'-methyluridine-3'-phosphate
  modified_base 19: mod_base = OTHER; note = 5'-methyluridine-3'-phosphate
ccggtcagatcttcaaaataaaa

SEQ ID NO: 95 - RNA, 19 nt, synthetic construct
  source 1..19: mol_type = other RNA
  modified_base 1: mod_base = OTHER; note = 2'-O-methyluridine-3'-phosphorothioate
  modified_base 2: mod_base = OTHER; note = 2'-O-methylcytidine-3'-phosphorothioate
  modified_base 3: mod_base = OTHER; note = 2'-O-methyladenosine-3'-phosphate
  modified_base 4: mod_base = OTHER; note = 2'-O-methylguanosine-3'-phosphate
  modified_base 5: mod_base = OTHER; note = 2'-deoxy-2'-fluoroadenosine-3'-phosphate
  modified_base 6: mod_base = OTHER; note = 2'-O-methyluridine-3'-phosphate
  modified_base 7: mod_base = OTHER; note = 2'-deoxy-2'-fluorocytidine-3'-phosphate
  modified_base 8: mod_base = OTHER; note = 2'-deoxy-2'-fluorouridine-3'-phosphate
  modified_base 9: mod_base = OTHER; note = 2'-deoxy-2'-fluorouridine-3'-phosphate
  modified_base 10: mod_base = OTHER; note = 2'-O-methylcytidine-3'-phosphate
  modified_base 11: mod_base = OTHER; note = 2'-O-methyladenosine-3'-phosphate
  modified_base 12: mod_base = OTHER; note = 2'-O-methyladenosine-3'-phosphate
  modified_base 13: mod_base = OTHER; note = 2'-O-methyladenosine-3'-phosphate
  modified_base 14: mod_base = OTHER; note = 2'-O-methyladenosine-3'-phosphate
  modified_base 15: mod_base = OTHER; note = 2'-O-methyluridine-3'-phosphate
  modified_base 16: mod_base = OTHER; note = 2'-O-methyladenosine-3'-phosphate
  modified_base 17: mod_base = OTHER; note = 2'-O-methyladenosine-3'-phosphate
  modified_base 18: mod_base = OTHER; note = 2'-O-methyladenosine-3'-phosphate
  modified_base 19: mod_base = OTHER; note = 2'-O-methyladenosine-3'-phosphate ((2S,4R)-1-[29-[[2-(acetylamino)-2-deoxy-beta-D-galactopyra nosyl]oxy]-14,14-bis[[3-[[3-[[5-[[2-(acetylamino)-2-deoxy-b eta-D-galactopyranosyl]oxy]-1-oxopentyl]amino]propyl]amino] -3-oxopropoxy]methyl]-1,12,19,25-tetraoxo-16-oxa-13,20,24-t riazanonacos-1-yl]-4-hydroxy-2-pyrrolidinyl)methyl ester
tcagatcttcaaaataaaa

SEQ ID NO: 96 - RNA, 21 nt, synthetic construct
  source 1..21: mol_type = other RNA
  modified_base 1: mod_base = OTHER; note = 2'-O-methyluridine-3'-phosphorothioate
  modified_base 2: mod_base = OTHER; note = 2'-deoxy-2'-fluorouridine-3'-phosphorothioate
  modified_base 3: mod_base = OTHER; note = 2'-O-methyluridine-3'-phosphate
  modified_base 4: mod_base = OTHER; note = 2'-O-methyluridine-3'-phosphate
  modified_base 5: mod_base = OTHER; note = 2'-O-methyladenosine-3'-phosphate
  modified_base 6: mod_base = OTHER; note = 2'-deoxy-2'-fluorouridine-3'-phosphate
  modified_base 7: mod_base = OTHER; note = 2'-O-methyluridine-3'-phosphate
  modified_base 8: mod_base = OTHER; note = 2'-deoxy-2'-fluorouridine-3'-phosphate
  modified_base 9: mod_base = OTHER; note = 2'-deoxy-2'-fluorouridine-3'-phosphate
  modified_base 10: mod_base = OTHER; note = 2'-O-methylguanosine-3'-phosphate
  modified_base 11: mod_base = OTHER; note = 2'-O-methyladenosine-3'-phosphate
  modified_base 12: mod_base = OTHER; note = 2'-O-methyladenosine-3'-phosphate
  modified_base 13: mod_base = OTHER; note = 2'-O-methylguanosine-3'-phosphate
  modified_base 14: mod_base = OTHER; note = 2'-deoxy-2'-fluoroadenosine-3'-phosphate
  modified_base 15: mod_base = OTHER; note = 2'-O-methyluridine-3'-phosphate
  modified_base 16: mod_base = OTHER; note = 2'-deoxy-2'-fluorocytidine-3'-phosphate
  modified_base 17: mod_base = OTHER; note = 2'-O-methyluridine-3'-phosphate
  modified_base 18: mod_base = OTHER; note = 2'-O-methylguanosine-3'-phosphate
  modified_base 19: mod_base = OTHER; note = 2'-O-methyladenosine-3'-phosphorothioate
  modified_base 20: mod_base = OTHER; note = 2'-O-methylcytidine-3'-phosphorothioate
  modified_base 21: mod_base = OTHER; note = 2'-O-methylcytidine
ttttattttgaagatctgacc

SEQ ID NO: 97 - RNA, 21 nt, synthetic construct
  source 1..21: mol_type = other RNA
  modified_base 3: mod_base = OTHER; note = 5'-methyluridine-3'-phosphate
  modified_base 8: mod_base = OTHER; note = 5'-methyluridine-3'-phosphate
  modified_base 10: mod_base = OTHER; note = 5'-methyluridine-3'-phosphate
  modified_base 11: mod_base = OTHER; note = 5'-methyluridine-3'-phosphate
  modified_base 17: mod_base = OTHER; note = 5'-methyluridine-3'-phosphate
ggtcagatcttcaaaataaaa

SEQ ID NO: 98 - RNA, 21 nt, synthetic construct
  source 1..21: mol_type = other RNA
  modified_base 1: mod_base = OTHER; note = 2'-O-methylguanosine-3'-phosphorothioate
  modified_base 2: mod_base = OTHER; note = 2'-O-methylguanosine-3'-phosphorothioate
  modified_base 3: mod_base = OTHER; note = 2'-O-methyluridine-3'-phosphate
  modified_base 4: mod_base = OTHER; note = 2'-O-methylcytidine-3'-phosphate
  modified_base 5: mod_base = OTHER; note = 2'-O-methyladenosine-3'-phosphate
  modified_base 6: mod_base = OTHER; note = 2'-O-methylguanosine-3'-phosphate
  modified_base 7: mod_base = OTHER; note = 2'-deoxy-2'-fluoroadenosine-3'-phosphate
  modified_base 8: mod_base = OTHER; note = 2'-O-methyluridine-3'-phosphate
  modified_base 9: mod_base = OTHER; note = 2'-deoxy-2'-fluorocytidine-3'-phosphate
  modified_base 10: mod_base = OTHER; note = 2'-deoxy-2'-fluorouridine-3'-phosphate
  modified_base 11: mod_base = OTHER; note = 2'-deoxy-2'-fluorouridine-3'-phosphate
  modified_base 12: mod_base = OTHER; note = 2'-O-methylcytidine-3'-phosphate
  modified_base 13: mod_base = OTHER; note = 2'-O-methyladenosine-3'-phosphate
  modified_base 14: mod_base = OTHER; note = 2'-O-methyladenosine-3'-phosphate
  modified_base 15: mod_base = OTHER; note = 2'-O-methyladenosine-3'-phosphate
  modified_base 16: mod_base = OTHER; note = 2'-O-methyladenosine-3'-phosphate
  modified_base 17: mod_base = OTHER; note = 2'-O-methyluridine-3'-phosphate
  modified_base 18: mod_base = OTHER; note = 2'-O-methyladenosine-3'-phosphate
  modified_base 19: mod_base = OTHER; note = 2'-O-methyladenosine-3'-phosphate
  modified_base 20: mod_base = OTHER; note = 2'-O-methyladenosine-3'-phosphate
  modified_base 21: mod_base = OTHER; note = 2'-O-methyladenosine-3'-phosphate ((2S,4R)-1-[29-[[2-(acetylamino)-2-deoxy-beta-D-galactopyra nosyl]oxy]-14,14-bis[[3-[[3-[[5-[[2-(acetylamino)-2-deoxy-b eta-D-galactopyranosyl]oxy]-1-oxopentyl]amino]propyl]amino] -3-oxopropoxy]methyl]-1,12,19,25-tetraoxo-16-oxa-13,20,24-t riazanonacos-1-yl]-4-hydroxy-2-pyrrolidinyl)methyl ester
ggtcagatcttcaaaataaaa

SEQ ID NO: 99 - RNA, 23 nt, synthetic construct
  source 1..23: mol_type = other RNA
  modified_base 1: mod_base = OTHER; note = 2'-O-methyluridine-3'-phosphorothioate
  modified_base 2: mod_base = OTHER; note = 2'-deoxy-2'-fluorouridine-3'-phosphorothioate
  modified_base 3: mod_base = OTHER; note = 2'-O-methyluridine-3'-phosphate
  modified_base 4: mod_base = OTHER; note = 2'-O-methyluridine-3'-phosphate
  modified_base 5: mod_base = OTHER; note = 2'-O-methyladenosine-3'-phosphate
  modified_base 6: mod_base = OTHER; note = 2'-deoxy-2'-fluorouridine-3'-phosphate
  modified_base 7: mod_base = OTHER; note = 2'-O-methyluridine-3'-phosphate
  modified_base 8: mod_base = OTHER; note = 2'-deoxy-2'-fluorouridine-3'-phosphate
  modified_base 9: mod_base = OTHER; note = 2'-deoxy-2'-fluorouridine-3'-phosphate
  modified_base 10: mod_base = OTHER; note = 2'-O-methylguanosine-3'-phosphate
  modified_base 11: mod_base = OTHER; note = 2'-O-methyladenosine-3'-phosphate
  modified_base 12: mod_base = OTHER; note = 2'-deoxy-2'-fluoroadenosine-3'-phosphate
  modified_base 13: mod_base = OTHER; note = 2'-O-methylguanosine-3'-phosphate
  modified_base 14: mod_base = OTHER; note = 2'-deoxy-2'-fluoroadenosine-3'-phosphate
  modified_base 15: mod_base = OTHER; note = 2'-O-methyluridine-3'-phosphate
  modified_base 16: mod_base = OTHER; note = 2'-deoxy-2'-fluorocytidine-3'-phosphate
  modified_base 17: mod_base = OTHER; note = 2'-O-methyluridine-3'-phosphate
  modified_base 18: mod_base = OTHER; note = 2'-O-methylguanosine-3'-phosphate
  modified_base 19: mod_base = OTHER; note = 2'-O-methyladenosine-3'-phosphate
  modified_base 20: mod_base = OTHER; note = 2'-O-methylcytidine-3'-phosphate
  modified_base 21: mod_base = OTHER; note = 2'-O-methylcytidine-3'-phosphorothioate
  modified_base 22: mod_base = OTHER; note = 2'-O-methyladenosine-3'-phosphorothioate
  modified_base 23: mod_base = OTHER; note = 2'-O-methyluridine
ttttattttgaagatctgaccat

SEQ ID NO: 100 - RNA, 23 nt, synthetic construct
  source 1..23: mol_type = other RNA
  modified_base 2: mod_base = OTHER; note = 5'-methyluridine-3'-phosphate
  modified_base 5: mod_base = OTHER; note = 5'-methyluridine-3'-phosphate
  modified_base 10: mod_base = OTHER; note = 5'-methyluridine-3'-phosphate
  modified_base 12: mod_base = OTHER; note = 5'-methyluridine-3'-phosphate
  modified_base 13: mod_base = OTHER; note = 5'-methyluridine-3'-phosphate
  modified_base 19: mod_base = OTHER; note = 5'-methyluridine-3'-phosphate
atggtcagatcttcaaaataaaa

SEQ ID NO: 101 - RNA, 21 nt, synthetic construct
  source 1..21: mol_type = other RNA
  modified_base 1: mod_base = OTHER; note = 2'-O-methylguanosine-3'-phosphorothioate
  modified_base 2: mod_base = OTHER; note = 2'-O-methylguanosine-3'-phosphorothioate
  modified_base 3: mod_base = OTHER; note = 2'-O-methyluridine-3'-phosphate
  modified_base 4: mod_base = OTHER; note = 2'-O-methylcytidine-3'-phosphate
  modified_base 5: mod_base = OTHER; note = 2'-O-methyladenosine-3'-phosphate
  modified_base 6: mod_base = OTHER; note = 2'-O-methylguanosine-3'-phosphate
  modified_base 7: mod_base = OTHER; note = 2'-O-methyladenosine-3'-phosphate
  modified_base 8: mod_base = OTHER; note = 2'-O-methyluridine-3'-phosphate
  modified_base 9: mod_base = OTHER; note = 2'-deoxy-2'-fluorocytidine-3'-phosphate
  modified_base 10: mod_base = OTHER; note = 2'-deoxy-2'-fluorouridine-3'-phosphate
  modified_base 11: mod_base = OTHER; note = 2'-deoxy-2'-fluorouridine-3'-phosphate
  modified_base 12: mod_base = OTHER; note = 2'-O-methylcytidine-3'-phosphate
  modified_base 13: mod_base = OTHER; note = 2'-O-methyladenosine-3'-phosphate
  modified_base 14: mod_base = OTHER; note = 2'-O-methyladenosine-3'-phosphate
  modified_base 15: mod_base = OTHER; note = 2'-O-methyladenosine-3'-phosphate
  modified_base 16: mod_base = OTHER; note = 2'-O-methyladenosine-3'-phosphate
  modified_base 17: mod_base = OTHER; note = 2'-O-methyluridine-3'-phosphate
  modified_base 18: mod_base = OTHER; note = 2'-O-methyladenosine-3'-phosphate
  modified_base 19: mod_base = OTHER; note = 2'-O-methyladenosine-3'-phosphate
  modified_base 20: mod_base = OTHER; note = 2'-O-methyladenosine-3'-phosphate
  modified_base 21: mod_base = OTHER; note = 2'-O-methyladenosine-3'-phosphate ((2S,4R)-1-[29-[[2-(acetylamino)-2-deoxy-beta-D-galactopyra nosyl]oxy]-14,14-bis[[3-[[3-[[5-[[2-(acetylamino)-2-deoxy-b eta-D-galactopyranosyl]oxy]-1-oxopentyl]amino]propyl]amino] -3-oxopropoxy]methyl]-1,12,19,25-tetraoxo-16-oxa-13,20,24-t riazanonacos-1-yl]-4-hydroxy-2-pyrrolidinyl)methyl ester
ggtcagatcttcaaaataaaa

SEQ ID NO: 102 - RNA, 23 nt, synthetic construct
  source 1..23: mol_type = other RNA
  modified_base 1: mod_base = OTHER; note = 2'-O-methyluridine-3'-phosphorothioate
  modified_base 2: mod_base = OTHER; note = 2'-deoxy-2'-fluorouridine-3'-phosphorothioate
  modified_base 3: mod_base = OTHER; note = 2'-O-methyluridine-3'-phosphate
  modified_base 4: mod_base = OTHER; note = 2'-O-methyluridine-3'-phosphate
  modified_base 5: mod_base = OTHER; note = 2'-O-methyladenosine-3'-phosphate
  modified_base 6: mod_base = OTHER; note = 2'-deoxy-2'-fluorouridine-3'-phosphate
  modified_base 7: mod_base = OTHER; note = 2'-O-methyluridine-3'-phosphate
  modified_base 8: mod_base = OTHER; note = 2'-deoxy-2'-fluorouridine-3'-phosphate
  modified_base 9: mod_base = OTHER; note = 2'-deoxy-2'-fluorouridine-3'-phosphate
  modified_base 10: mod_base = OTHER; note = 2'-O-methylguanosine-3'-phosphate
  modified_base 11: mod_base = OTHER; note = 2'-O-methyladenosine-3'-phosphate
  modified_base 12: mod_base = OTHER; note = 2'-O-methyladenosine-3'-phosphate
  modified_base 13: mod_base = OTHER; note = 2'-O-methylguanosine-3'-phosphate
  modified_base 14: mod_base = OTHER; note = 2'-deoxy-2'-fluoroadenosine-3'-phosphate
  modified_base 15: mod_base = OTHER; note = 2'-O-methyluridine-3'-phosphate
  modified_base 16: mod_base = OTHER; note = 2'-deoxy-2'-fluorocytidine-3'-phosphate
  modified_base 17: mod_base = OTHER; note = 2'-O-methyluridine-3'-phosphate
  modified_base 18: mod_base = OTHER; note = 2'-O-methylguanosine-3'-phosphate
  modified_base 19: mod_base = OTHER; note = 2'-O-methyladenosine-3'-phosphate
  modified_base 20: mod_base = OTHER; note = 2'-O-methylcytidine-3'-phosphate
  modified_base 21: mod_base = OTHER; note = 2'-O-methylcytidine-3'-phosphorothioate
  modified_base 22: mod_base = OTHER; note = 2'-O-methyladenosine-3'-phosphorothioate
  modified_base 23: mod_base = OTHER; note = 2'-O-methyluridine
ttttattttgaagatctgaccat

SEQ ID NO: 103 - RNA, 23 nt, synthetic construct
  source 1..23: mol_type = other RNA
  modified_base 2: mod_base = OTHER; note = 5'-methyluridine-3'-phosphate
  modified_base 5: mod_base = OTHER; note = 5'-methyluridine-3'-phosphate
  modified_base 10: mod_base = OTHER; note = 5'-methyluridine-3'-phosphate
  modified_base 12: mod_base = OTHER; note = 5'-methyluridine-3'-phosphate
  modified_base 13: mod_base = OTHER; note = 5'-methyluridine-3'-phosphate
  modified_base 19: mod_base = OTHER; note = 5'-methyluridine-3'-phosphate
atggtcagatcttcaaaataaaa

SEQ ID NO: 104 - RNA, 21 nt, synthetic construct
  source 1..21: mol_type = other RNA
  modified_base 1: mod_base = OTHER; note = 2'-O-methylguanosine-3'-phosphorothioate
  modified_base 2: mod_base = OTHER; note = 2'-O-methylguanosine-3'-phosphorothioate
  modified_base 3: mod_base = OTHER; note = 2'-O-methyluridine-3'-phosphate
  modified_base 4: mod_base = OTHER; note = 2'-O-methylcytidine-3'-phosphate
  modified_base 5: mod_base = OTHER; note = 2'-O-methyladenosine-3'-phosphate
  modified_base 6: mod_base = OTHER; note = 2'-O-methylguanosine-3'-phosphate
  modified_base 7: mod_base = OTHER; note = 2'-deoxy-2'-fluoroadenosine-3'-phosphate
  modified_base 8: mod_base = OTHER; note = 2'-O-methyluridine-3'-phosphate
  modified_base 9: mod_base = OTHER; note = 2'-deoxy-2'-fluorocytidine-3'-phosphate
  modified_base 10: mod_base = OTHER; note = 2'-deoxy-2'-fluorouridine-3'-phosphate
  modified_base 11: mod_base = OTHER; note = 2'-deoxy-2'-fluorouridine-3'-phosphate
  modified_base 12: mod_base = OTHER; note = 2'-O-methylcytidine-3'-phosphate
  modified_base 13: mod_base = OTHER; note = 2'-O-methyladenosine-3'-phosphate
  modified_base 14: mod_base = OTHER; note = 2'-O-methyladenosine-3'-phosphate
  modified_base 15: mod_base = OTHER; note = 2'-O-methyladenosine-3'-phosphate
  modified_base 16: mod_base = OTHER; note = 2'-O-methyladenosine-3'-phosphate
  modified_base 17: mod_base = OTHER; note = 2'-O-methyluridine-3'-phosphate
  modified_base 18: mod_base = OTHER; note = 2'-O-methyladenosine-3'-phosphate
  modified_base 19: mod_base = OTHER; note = 2'-O-methyladenosine-3'-phosphate
  modified_base 20: mod_base = OTHER; note = 2'-O-methyladenosine-3'-phosphate
  modified_base 21: mod_base = OTHER; note = 2'-O-methyladenosine-3'-phosphate ((2S,4R)-1-[29-[[2-(acetylamino)-2-deoxy-beta-D-galactopyra nosyl]oxy]-14,14-bis[[3-[[3-[[5-[[2-(acetylamino)-2-deoxy-b eta-D-galactopyranosyl]oxy]-1-oxopentyl]amino]propyl]amino] -3-oxopropoxy]methyl]-1,12,19,25-tetraoxo-16-oxa-13,20,24-t riazanonacos-1-yl]-4-hydroxy-2-pyrrolidinyl)methyl ester
ggtcagatcttcaaaataaaa

SEQ ID NO: 105 - RNA, 23 nt, synthetic construct
  source 1..23: mol_type = other RNA
  modified_base 1: mod_base = OTHER; note = 2'-O-methyluridine-3'-phosphorothioate
  modified_base 2: mod_base = OTHER; note = 2'-deoxy-2'-fluorouridine-3'-phosphorothioate
  modified_base 3: mod_base = OTHER; note = 2'-O-methyluridine-3'-phosphate
  modified_base 4: mod_base = OTHER; note = 2'-O-methyluridine-3'-phosphate
  modified_base 5: mod_base = OTHER; note = 2'-O-methyladenosine-3'-phosphate
  modified_base 6: mod_base = OTHER; note = 2'-deoxy-2'-fluorouridine-3'-phosphate
  modified_base 7: mod_base = OTHER; note = 2'-O-methyluridine-3'-phosphate
  modified_base 8: mod_base = OTHER; note = 2'-O-methyluridine-3'-phosphate
  modified_base 9: mod_base = OTHER; note = 2'-O-methyluridine-3'-phosphate
  modified_base 10: mod_base = OTHER; note = 2'-O-methylguanosine-3'-phosphate
  modified_base 11: mod_base = OTHER; note = 2'-O-methyladenosine-3'-phosphate
  modified_base 12: mod_base = OTHER; note = 2'-O-methyladenosine-3'-phosphate
  modified_base 13: mod_base = OTHER; note = 2'-O-methylguanosine-3'-phosphate
  modified_base 14: mod_base = OTHER; note = 2'-deoxy-2'-fluoroadenosine-3'-phosphate
  modified_base 15: mod_base = OTHER; note = 2'-O-methyluridine-3'-phosphate
  modified_base 16: mod_base = OTHER; note = 2'-deoxy-2'-fluorocytidine-3'-phosphate
  modified_base 17: mod_base = OTHER; note = 2'-O-methyluridine-3'-phosphate
  modified_base 18: mod_base = OTHER; note = 2'-O-methylguanosine-3'-phosphate
  modified_base 19: mod_base = OTHER; note = 2'-O-methyladenosine-3'-phosphate
  modified_base 20: mod_base = OTHER; note = 2'-O-methylcytidine-3'-phosphate
  modified_base 21: mod_base = OTHER; note = 2'-O-methylcytidine-3'-phosphorothioate
  modified_base 22: mod_base = OTHER; note = 2'-O-methyladenosine-3'-phosphorothioate
  modified_base 23: mod_base = OTHER; note = 2'-O-methyluridine
ttttattttgaagatctgaccat

SEQ ID NO: 106 - RNA, 23 nt, synthetic construct
  source 1..23: mol_type = other RNA
  modified_base 2: mod_base = OTHER; note = 5'-methyluridine-3'-phosphate
  modified_base 5: mod_base = OTHER; note = 5'-methyluridine-3'-phosphate
  modified_base 10: mod_base = OTHER; note = 5'-methyluridine-3'-phosphate
  modified_base 12: mod_base = OTHER; note = 5'-methyluridine-3'-phosphate
  modified_base 13: mod_base = OTHER; note = 5'-methyluridine-3'-phosphate
  modified_base 19: mod_base = OTHER; note = 5'-methyluridine-3'-phosphate
atggtcagatcttcaaaataaaa

SEQ ID NO: 107 - RNA, 21 nt, synthetic construct
  source 1..21: mol_type = other RNA
  modified_base 1: mod_base = OTHER; note = 2'-O-methylguanosine-3'-phosphorothioate
  modified_base 2: mod_base = OTHER; note = 2'-O-methylguanosine-3'-phosphorothioate
  modified_base 3: mod_base = OTHER; note = 2'-O-methyluridine-3'-phosphate
  modified_base 4: mod_base = OTHER; note = 2'-O-methylcytidine-3'-phosphate
  modified_base 5: mod_base = OTHER; note = 2'-O-methyladenosine-3'-phosphate
  modified_base 6: mod_base = OTHER; note = 2'-O-methylguanosine-3'-phosphate
  modified_base 7: mod_base = OTHER; note = 2'-deoxy-2'-fluoroadenosine-3'-phosphate
  modified_base 8: mod_base = OTHER; note = 2'-O-methyluridine-3'-phosphate
  modified_base 9: mod_base = OTHER; note = 2'-deoxy-2'-fluorocytidine-3'-phosphate
  modified_base 10: mod_base = OTHER; note = 2'-deoxy-2'-fluorouridine-3'-phosphate
  modified_base 11: mod_base = OTHER; note = 2'-deoxy-2'-fluorouridine-3'-phosphate
  modified_base 12: mod_base = OTHER; note = 2'-O-methylcytidine-3'-phosphate
  modified_base 13: mod_base = OTHER; note = 2'-O-methyladenosine-3'-phosphate
  modified_base 14: mod_base = OTHER; note = 2'-O-methyladenosine-3'-phosphate
  modified_base 15: mod_base = OTHER; note = 2'-O-methyladenosine-3'-phosphate
  modified_base 16: mod_base = OTHER; note = 2'-O-methyladenosine-3'-phosphate
  modified_base 17: mod_base = OTHER; note = 2'-O-methyluridine-3'-phosphate
  modified_base 18: mod_base = OTHER; note = 2'-O-methyladenosine-3'-phosphate
  modified_base 19: mod_base = OTHER; note = 2'-O-methyladenosine-3'-phosphate
  modified_base 20: mod_base = OTHER; note = 2'-O-methyladenosine-3'-phosphate
  modified_base 21: mod_base = OTHER; note = 2'-O-methyladenosine-3'-phosphate ((2S,4R)-1-[29-[[2-(acetylamino)-2-deoxy-beta-D-galactopyra nosyl]oxy]-14,14-bis[[3-[[3-[[5-[[2-(acetylamino)-2-deoxy-b eta-D-galactopyranosyl]oxy]-1-oxopentyl]amino]propyl]amino] -3-oxopropoxy]methyl]-1,12,19,25-tetraoxo-16-oxa-13,20,24-t riazanonacos-1-yl]-4-hydroxy-2-pyrrolidinyl)methyl ester
ggtcagatcttcaaaataaaa

SEQ ID NO: 108 - RNA, 23 nt, synthetic construct
  source 1..23: mol_type = other RNA
  modified_base 1: mod_base = OTHER; note = 2'-O-methyluridine-3'-phosphorothioate
  modified_base 2: mod_base = OTHER; note = 2'-deoxy-2'-fluorouridine-3'-phosphorothioate
  modified_base 3: mod_base = OTHER; note = 2'-O-methyluridine-3'-phosphate
  modified_base 4: mod_base = OTHER; note = 2'-O-methyluridine-3'-phosphate
  modified_base 5: mod_base = OTHER; note = 2'-O-methyladenosine-3'-phosphate
  modified_base 6: mod_base = OTHER; note = 2'-deoxy-2'-fluorouridine-3'-phosphate
  modified_base 7: mod_base = OTHER; note = 2'-O-methyluridine-3'-phosphate
  modified_base 8: mod_base = OTHER; note = 2'-O-methyluridine-3'-phosphate
  modified_base 9: mod_base = OTHER; note = 2'-O-methyluridine-3'-phosphate
  modified_base 10: mod_base = OTHER; note = 2'-O-methylguanosine-3'-phosphate
  modified_base 11: mod_base = OTHER; note = 2'-O-methyladenosine-3'-phosphate
  modified_base 12: mod_base = OTHER; note = 2'-deoxy-2'-fluoroadenosine-3'-phosphate
  modified_base 13: mod_base = OTHER; note = 2'-O-methylguanosine-3'-phosphate
  modified_base 14: mod_base = OTHER; note = 2'-deoxy-2'-fluoroadenosine-3'-phosphate
  modified_base 15: mod_base = OTHER; note = 2'-O-methyluridine-3'-phosphate
  modified_base 16: mod_base = OTHER; note = 2'-deoxy-2'-fluorocytidine-3'-phosphate
  modified_base 17: mod_base = OTHER; note = 2'-O-methyluridine-3'-phosphate
  modified_base 18: mod_base = OTHER; note = 2'-O-methylguanosine-3'-phosphate
  modified_base 19: mod_base = OTHER; note = 2'-O-methyladenosine-3'-phosphate
  modified_base 20: mod_base = OTHER; note = 2'-O-methylcytidine-3'-phosphate
  modified_base 21: mod_base = OTHER; note = 2'-O-methylcytidine-3'-phosphorothioate
  modified_base 22: mod_base = OTHER; note = 2'-O-methyladenosine-3'-phosphorothioate
  modified_base 23: mod_base = OTHER; note = 2'-O-methyluridine
ttttattttgaagatctgaccat

SEQ ID NO: 109 - RNA, 23 nt, synthetic construct
  source 1..23: mol_type = other RNA
  modified_base 2: mod_base = OTHER; note = 5'-methyluridine-3'-phosphate
  modified_base 5: mod_base = OTHER; note = 5'-methyluridine-3'-phosphate
  modified_base 10: mod_base = OTHER; note = 5'-methyluridine-3'-phosphate
  modified_base 12: mod_base = OTHER; note = 5'-methyluridine-3'-phosphate
  modified_base 13: mod_base = OTHER; note = 5'-methyluridine-3'-phosphate
  modified_base 19: mod_base = OTHER; note = 5'-methyluridine-3'-phosphate
atggtcagatcttcaaaataaaa

SEQ ID NO: 110 - RNA, 21 nt, synthetic construct
  source 1..21: mol_type = other RNA
  modified_base 1: mod_base = OTHER; note = 2'-O-methylguanosine-3'-phosphorothioate
  modified_base 2: mod_base = OTHER; note = 2'-O-methylguanosine-3'-phosphorothioate
  modified_base 3: mod_base = OTHER; note = 2'-O-methyluridine-3'-phosphate
  modified_base 4: mod_base = OTHER; note = 2'-O-methylcytidine-3'-phosphate
  modified_base 5: mod_base = OTHER; note = 2'-O-methyladenosine-3'-phosphate
  modified_base 6: mod_base = OTHER; note = 2'-O-methylguanosine-3'-phosphate
  modified_base 7: mod_base = OTHER; note = 2'-O-methyladenosine-3'-phosphate
  modified_base 8: mod_base = OTHER; note = 2'-O-methyluridine-3'-phosphate
  modified_base 9: mod_base = OTHER; note = 2'-deoxy-2'-fluorocytidine-3'-phosphate
  modified_base 10: mod_base = OTHER; note = 2'-deoxy-2'-fluorouridine-3'-phosphate
  modified_base 11: mod_base = OTHER; note = 2'-deoxy-2'-fluorouridine-3'-phosphate
  modified_base 12: mod_base = OTHER; note = 2'-O-methylcytidine-3'-phosphate
  modified_base 13: mod_base = OTHER; note = 2'-O-methyladenosine-3'-phosphate
  modified_base 14: mod_base = OTHER; note = 2'-O-methyladenosine-3'-phosphate
  modified_base 15: mod_base = OTHER; note = 2'-O-methyladenosine-3'-phosphate
  modified_base 16: mod_base = OTHER; note = 2'-O-methyladenosine-3'-phosphate
  modified_base 17: mod_base = OTHER; note = 2'-O-methyluridine-3'-phosphate
  modified_base 18: mod_base = OTHER; note = 2'-O-methyladenosine-3'-phosphate
  modified_base 19: mod_base = OTHER; note = 2'-O-methyladenosine-3'-phosphate
  modified_base 20: mod_base = OTHER; note = 2'-O-methyladenosine-3'-phosphate
  modified_base 21: mod_base = OTHER; note = 2'-O-methyladenosine-3'-phosphate ((2S,4R)-1-[29-[[2-(acetylamino)-2-deoxy-beta-D-galactopyra nosyl]oxy]-14,14-bis[[3-[[3-[[5-[[2-(acetylamino)-2-deoxy-b eta-D-galactopyranosyl]oxy]-1-oxopentyl]amino]propyl]amino] -3-oxopropoxy]methyl]-1,12,19,25-tetraoxo-16-oxa-13,20,24-t riazanonacos-1-yl]-4-hydroxy-2-pyrrolidinyl)methyl ester
ggtcagatcttcaaaataaaa

SEQ ID NO: 111 - RNA, 23 nt, synthetic construct
  source 1..23: mol_type = other RNA
  modified_base 1: mod_base = OTHER; note = 2'-O-methyluridine-3'-phosphorothioate
  modified_base 2: mod_base = OTHER; note = 2'-deoxy-2'-fluorouridine-3'-phosphorothioate
  modified_base 3: mod_base = OTHER; note = 2'-O-methyluridine-3'-phosphate
  modified_base 4: mod_base = OTHER; note = 2'-O-methyluridine-3'-phosphate
  modified_base 5: mod_base = OTHER; note = 2'-O-methyladenosine-3'-phosphate
  modified_base 6: mod_base = OTHER; note = 2'-deoxy-2'-fluorouridine-3'-phosphate
  modified_base 7: mod_base = OTHER; note = 2'-O-methyluridine-3'-phosphate
  modified_base 8: mod_base = OTHER; note = 2'-deoxy-2'-fluorouridine-3'-phosphate
  modified_base 9: mod_base = OTHER; note = 2'-deoxy-2'-fluorouridine-3'-phosphate
  modified_base 10: mod_base = OTHER; note = 2'-O-methylguanosine-3'-phosphate
  modified_base 11: mod_base = OTHER; note = 2'-O-methyladenosine-3'-phosphate
  modified_base 12: mod_base = OTHER; note = 2'-deoxy-2'-fluoroadenosine-3'-phosphate
  modified_base 13: mod_base = OTHER; note = 2'-O-methylguanosine-3'-phosphate
  modified_base 14: mod_base = OTHER; note = 2'-deoxy-2'-fluoroadenosine-3'-phosphate
  modified_base 15: mod_base = OTHER; note = 2'-O-methyluridine-3'-phosphate
  modified_base 16: mod_base = OTHER; note = 2'-deoxy-2'-fluorocytidine-3'-phosphate
  modified_base 17: mod_base = OTHER; note = 2'-O-methyluridine-3'-phosphate
  modified_base 18: mod_base = OTHER; note = 2'-O-methylguanosine-3'-phosphate
  modified_base 19: mod_base = OTHER; note = 2'-O-methyladenosine-3'-phosphate
  modified_base 20: mod_base = OTHER; note = 2'-O-methylcytidine-3'-phosphate
  modified_base 21: mod_base = OTHER; note = 2'-O-methylcytidine-3'-phosphorothioate
  modified_base 22: mod_base = OTHER; note = 2'-O-methyladenosine-3'-phosphorothioate
  modified_base 23: mod_base = OTHER; note = 2'-O-methyluridine
ttttattttgaagatctgaccat

SEQ ID NO: 112 - RNA, 23 nt, synthetic construct
  source 1..23: mol_type = other RNA
  modified_base 2: mod_base = OTHER; note = 5'-methyluridine-3'-phosphate
  modified_base 5: mod_base = OTHER; note = 5'-methyluridine-3'-phosphate
  modified_base 10: mod_base = OTHER; note = 5'-methyluridine-3'-phosphate
  modified_base 12: mod_base = OTHER; note = 5'-methyluridine-3'-phosphate
  modified_base 13: mod_base = OTHER; note = 5'-methyluridine-3'-phosphate
  modified_base 19: mod_base = OTHER; note = 5'-methyluridine-3'-phosphate
atggtcagatcttcaaaataaaa

SEQ ID NO: 113 - RNA, 21 nt, synthetic construct
  source 1..21: mol_type = other RNA
  modified_base 1: mod_base = OTHER; note = 2'-O-methylguanosine-3'-phosphorothioate
  modified_base 2: mod_base = OTHER; note = 2'-O-methylguanosine-3'-phosphorothioate
  modified_base 3: mod_base = OTHER; note = 2'-O-methyluridine-3'-phosphate
  modified_base 4: mod_base = OTHER; note = 2'-O-methylcytidine-3'-phosphate
  modified_base 5: mod_base = OTHER; note = 2'-O-methyladenosine-3'-phosphate
  modified_base 6: mod_base = OTHER; note = 2'-O-methylguanosine-3'-phosphate
  modified_base 7: mod_base = OTHER; note = 2'-O-methyladenosine-3'-phosphate
  modified_base 8: mod_base = OTHER; note = 2'-O-methyluridine-3'-phosphate
  modified_base 9: mod_base = OTHER; note = 2'-deoxy-2'-fluorocytidine-3'-phosphate
  modified_base 10: mod_base = OTHER; note = 2'-deoxy-2'-fluorouridine-3'-phosphate
  modified_base 11: mod_base = OTHER; note = 2'-deoxy-2'-fluorouridine-3'-phosphate
  modified_base 12: mod_base = OTHER; note = 2'-O-methylcytidine-3'-phosphate
  modified_base 13: mod_base = OTHER; note = 2'-O-methyladenosine-3'-phosphate
  modified_base 14: mod_base = OTHER; note = 2'-O-methyladenosine-3'-phosphate
  modified_base 15: mod_base = OTHER; note = 2'-O-methyladenosine-3'-phosphate
  modified_base 16: mod_base = OTHER; note = 2'-O-methyladenosine-3'-phosphate
  modified_base 17: mod_base = OTHER; note = 2'-O-methyluridine-3'-phosphate
  modified_base 18: mod_base = OTHER; note = 2'-O-methyladenosine-3'-phosphate
  modified_base 19: mod_base = OTHER; note = 2'-O-methyladenosine-3'-phosphate
  modified_base 20: mod_base = OTHER; note = 2'-O-methyladenosine-3'-phosphate
  modified_base 21: mod_base = OTHER; note = 2'-O-methyladenosine-3'-phosphate ((2S,4R)-1-[29-[[2-(acetylamino)-2-deoxy-beta-D-galactopyra nosyl]oxy]-14,14-bis[[3-[[3-[[5-[[2-(acetylamino)-2-deoxy-b eta-D-galactopyranosyl]oxy]-1-oxopentyl]amino]propyl]amino] -3-oxopropoxy]methyl]-1,12,19,25-tetraoxo-16-oxa-13,20,24-t riazanonacos-1-yl]-4-hydroxy-2-pyrrolidinyl)methyl ester
ggtcagatcttcaaaataaaa

SEQ ID NO: 114 - RNA, 23 nt, synthetic construct
  source 1..23: mol_type = other RNA
  modified_base 1: mod_base = OTHER; note = 2'-O-methyluridine-3'-phosphorothioate
  modified_base 2: mod_base = OTHER; note = 2'-deoxy-2'-fluorouridine-3'-phosphorothioate
  modified_base 3: mod_base = OTHER; note = 2'-O-methyluridine-3'-phosphate
  modified_base 4: mod_base = OTHER; note = 2'-O-methyluridine-3'-phosphate
  modified_base 5: mod_base = OTHER; note = 2'-O-methyladenosine-3'-phosphate
  modified_base 6: mod_base = OTHER; note = 2'-deoxy-2'-fluorouridine-3'-phosphate
  modified_base 7: mod_base = OTHER; note = 2'-O-methyluridine-3'-phosphate
  modified_base 8: mod_base = OTHER; note = 2'-O-methyluridine-3'-phosphate
  modified_base 9: mod_base = OTHER; note = 2'-O-methyluridine-3'-phosphate
  modified_base 10: mod_base = OTHER; note = 2'-O-methylguanosine-3'-phosphate
  modified_base 11: mod_base = OTHER; note = 2'-O-methyladenosine-3'-phosphate
  modified_base 12: mod_base = OTHER; note = 2'-deoxy-2'-fluoroadenosine-3'-phosphate
  modified_base 13: mod_base = OTHER; note = 2'-O-methylguanosine-3'-phosphate
  modified_base 14: mod_base = OTHER; note = 2'-deoxy-2'-fluoroadenosine-3'-phosphate
  modified_base 15: mod_base = OTHER; note = 2'-O-methyluridine-3'-phosphate
  modified_base 16: mod_base = OTHER; note = 2'-deoxy-2'-fluorocytidine-3'-phosphate
  modified_base 17: mod_base = OTHER; note = 2'-O-methyluridine-3'-phosphate
  modified_base 18: mod_base = OTHER; note = 2'-O-methylguanosine-3'-phosphate
  modified_base 19: mod_base = OTHER; note = 2'-O-methyladenosine-3'-phosphate
  modified_base 20: mod_base = OTHER; note = 2'-O-methylcytidine-3'-phosphate
  modified_base 21: mod_base = OTHER; note = 2'-O-methylcytidine-3'-phosphorothioate
  modified_base 22: mod_base = OTHER; note = 2'-O-methyladenosine-3'-phosphorothioate
  modified_base 23: mod_base = OTHER; note = 2'-O-methyluridine
ttttattttgaagatctgaccat

SEQ ID NO: 115 - RNA, 23 nt, synthetic construct
  source 1..23: mol_type = other RNA
  modified_base 2: mod_base = OTHER; note = 5'-methyluridine-3'-phosphate
  modified_base 5: mod_base = OTHER; note = 5'-methyluridine-3'-phosphate
  modified_base 10: mod_base = OTHER; note = 5'-methyluridine-3'-phosphate
  modified_base 12: mod_base = OTHER; note = 5'-methyluridine-3'-phosphate
  modified_base 13: mod_base = OTHER; note = 5'-methyluridine-3'-phosphate
  modified_base 19: mod_base = OTHER; note = 5'-methyluridine-3'-phosphate
atggtcagatcttcaaaataaaa

SEQ ID NO: 116 - RNA, 21 nt, synthetic construct
  source 1..21: mol_type = other RNA
  modified_base 1: mod_base = OTHER; note = 2'-O-methylguanosine-3'-phosphorothioate
  modified_base 2: mod_base = OTHER; note = 2'-O-methylguanosine-3'-phosphorothioate
  modified_base 3: mod_base = OTHER; note = 2'-O-methyluridine-3'-phosphate
  modified_base 4: mod_base = OTHER; note = 2'-O-methylcytidine-3'-phosphate
  modified_base 5: mod_base = OTHER; note = 2'-O-methyladenosine-3'-phosphate
  modified_base 6: mod_base = OTHER; note = 2'-O-methylguanosine-3'-phosphate
  modified_base 7: mod_base = OTHER; note = 2'-O-methyladenosine-3'-phosphate
  modified_base 8: mod_base = OTHER; note = 2'-O-methyluridine-3'-phosphate
  modified_base 9: mod_base = OTHER; note = 2'-O-methylcytidine-3'-phosphate
  modified_base 10: mod_base = OTHER; note = 2'-deoxy-2'-fluorouridine-3'-phosphate
  modified_base 11: mod_base = OTHER; note = 2'-deoxy-2'-fluorouridine-3'-phosphate
  modified_base 12: mod_base = OTHER; note = 2'-O-methylcytidine-3'-phosphate
  modified_base 13: mod_base = OTHER; note = 2'-O-methyladenosine-3'-phosphate
  modified_base 14: mod_base = OTHER; note = 2'-O-methyladenosine-3'-phosphate
  modified_base 15: mod_base = OTHER; note = 2'-O-methyladenosine-3'-phosphate
  modified_base 16: mod_base = OTHER; note = 2'-O-methyladenosine-3'-phosphate
  modified_base 17: mod_base = OTHER; note = 2'-O-methyluridine-3'-phosphate
  modified_base 18: mod_base = OTHER; note = 2'-O-methyladenosine-3'-phosphate
  modified_base 19: mod_base = OTHER; note = 2'-O-methyladenosine-3'-phosphate
  modified_base 20: mod_base = OTHER; note = 2'-O-methyladenosine-3'-phosphate
  modified_base 21: mod_base = OTHER; note = 2'-O-methyladenosine-3'-phosphate ((2S,4R)-1-[29-[[2-(acetylamino)-2-deoxy-beta-D-galactopyra nosyl]oxy]-14,14-bis[[3-[[3-[[5-[[2-(acetylamino)-2-deoxy-b eta-D-galactopyranosyl]oxy]-1-oxopentyl]amino]propyl]amino] -3-oxopropoxy]methyl]-1,12,19,25-tetraoxo-16-oxa-13,20,24-t riazanonacos-1-yl]-4-hydroxy-2-pyrrolidinyl)methyl ester
ggtcagatcttcaaaataaaa

SEQ ID NO: 117 - RNA, 23 nt, synthetic construct
  source 1..23: mol_type = other RNA
  modified_base 1: mod_base = OTHER; note = 2'-O-methyluridine-3'-phosphorothioate
  modified_base 2: mod_base = OTHER; note = 2'-deoxy-2'-fluorouridine-3'-phosphorothioate
  modified_base 3: mod_base = OTHER; note = 2'-O-methyluridine-3'-phosphate
  modified_base 4: mod_base = OTHER; note = 2'-O-methyluridine-3'-phosphate
  modified_base 5: mod_base = OTHER; note = 2'-O-methyladenosine-3'-phosphate
  modified_base 6: mod_base = OTHER; note = 2'-deoxy-2'-fluorouridine-3'-phosphate
  modified_base 7: mod_base = OTHER; note = 2'-O-methyluridine-3'-phosphate
  modified_base 8: mod_base = OTHER; note = 2'-deoxy-2'-fluorouridine-3'-phosphate
  modified_base 9: mod_base = OTHER; note = 2'-deoxy-2'-fluorouridine-3'-phosphate
  modified_base 10: mod_base = OTHER; note = 2'-O-methylguanosine-3'-phosphate
  modified_base 11: mod_base = OTHER; note = 2'-O-methyladenosine-3'-phosphate
  modified_base 12: mod_base = OTHER; note = 2'-deoxy-2'-fluoroadenosine-3'-phosphate
  modified_base 13: mod_base = OTHER; note = 2'-O-methylguanosine-3'-phosphate
  modified_base 14: mod_base = OTHER; note = 2'-deoxy-2'-fluoroadenosine-3'-phosphate
  modified_base 15: mod_base = OTHER; note = 2'-O-methyluridine-3'-phosphate
  modified_base 16: mod_base = OTHER; note = 2'-deoxy-2'-fluorocytidine-3'-phosphate
  modified_base 17: mod_base = OTHER; note = 2'-O-methyluridine-3'-phosphate
  modified_base 18: mod_base = OTHER; note = 2'-O-methylguanosine-3'-phosphate
  modified_base 19: mod_base = OTHER; note = 2'-O-methyladenosine-3'-phosphate
  modified_base 20: mod_base = OTHER; note = 2'-O-methylcytidine-3'-phosphate
  modified_base 21: mod_base = OTHER; note = 2'-O-methylcytidine-3'-phosphorothioate
  modified_base 22: mod_base = OTHER; note = 2'-O-methyladenosine-3'-phosphorothioate
  modified_base 23: mod_base = OTHER; note = 2'-O-methyluridine
ttttattttgaagatctgaccat

SEQ ID NO: 118 - RNA, 23 nt, synthetic construct
  source 1..23: mol_type = other RNA
  modified_base 2: mod_base = OTHER; note = 5'-methyluridine-3'-phosphate
  modified_base 5: mod_base = OTHER; note = 5'-methyluridine-3'-phosphate
  modified_base 10: mod_base = OTHER; note = 5'-methyluridine-3'-phosphate
  modified_base 12: mod_base = OTHER; note = 5'-methyluridine-3'-phosphate
  modified_base 13: mod_base = OTHER; note = 5'-methyluridine-3'-phosphate
  modified_base 19: mod_base = OTHER; note = 5'-methyluridine-3'-phosphate
atggtcagatcttcaaaataaaa

SEQ ID NO: 119 - RNA, 21 nt, synthetic construct
  source 1..21: mol_type = other RNA
  modified_base 1: mod_base = OTHER; note = 2'-O-methylguanosine-3'-phosphorothioate
  modified_base 2: mod_base = OTHER; note = 2'-O-methylguanosine-3'-phosphorothioate
  modified_base 3: mod_base = OTHER; note = 2'-O-methyluridine-3'-phosphate
  modified_base 4: mod_base = OTHER; note = 2'-O-methylcytidine-3'-phosphate
  modified_base 5: mod_base = OTHER; note = 2'-O-methyladenosine-3'-phosphate
  modified_base 6: mod_base = OTHER; note = 2'-O-methylguanosine-3'-phosphate
  modified_base 7: mod_base = OTHER; note = 2'-O-methyladenosine-3'-phosphate
  modified_base 8: mod_base = OTHER; note = 2'-O-methyluridine-3'-phosphate
  modified_base 9: mod_base = OTHER; note = 2'-O-methylcytidine-3'-phosphate
  modified_base 10: mod_base = OTHER; note = 2'-deoxy-2'-fluorouridine-3'-phosphate
  modified_base 11: mod_base = OTHER; note = 2'-deoxy-2'-fluorouridine-3'-phosphate
  modified_base 12: mod_base = OTHER; note = 2'-O-methylcytidine-3'-phosphate
  modified_base 13: mod_base = OTHER; note = 2'-O-methyladenosine-3'-phosphate
  modified_base 14: mod_base = OTHER; note = 2'-O-methyladenosine-3'-phosphate
  modified_base 15: mod_base = OTHER; note = 2'-O-methyladenosine-3'-phosphate
  modified_base 16: mod_base = OTHER; note = 2'-O-methyladenosine-3'-phosphate
  modified_base 17: mod_base = OTHER; note = 2'-O-methyluridine-3'-phosphate
  modified_base 18: mod_base = OTHER; note = 2'-O-methyladenosine-3'-phosphate
  modified_base 19: mod_base = OTHER; note = 2'-O-methyladenosine-3'-phosphate
  modified_base 20: mod_base = OTHER; note = 2'-O-methyladenosine-3'-phosphate
  modified_base 21: mod_base = OTHER; note = 2'-O-methyladenosine-3'-phosphate ((2S,4R)-1-[29-[[2-(acetylamino)-2-deoxy-beta-D-galactopyra nosyl]oxy]-14,14-bis[[3-[[3-[[5-[[2-(acetylamino)-2-deoxy-b eta-D-galactopyranosyl]oxy]-1-oxopentyl]amino]propyl]amino] -3-oxopropoxy]methyl]-1,12,19,25-tetraoxo-16-oxa-13,20,24-t riazanonacos-1-yl]-4-hydroxy-2-pyrrolidinyl)methyl ester
ggtcagatcttcaaaataaaa

SEQ ID NO: 120 - RNA, 23 nt, synthetic construct
  source 1..23: mol_type = other RNA
  modified_base 1: mod_base = OTHER; note = 2'-O-methyluridine-3'-phosphorothioate
  modified_base 2: mod_base = OTHER; note = 2'-deoxy-2'-fluorouridine-3'-phosphorothioate
  modified_base 3: mod_base = OTHER; note = 2'-O-methyluridine-3'-phosphate
  modified_base 4: mod_base = OTHER; note = 2'-O-methyluridine-3'-phosphate
  modified_base 5: mod_base = OTHER; note = 2'-O-methyladenosine-3'-phosphate
  modified_base 6: mod_base = OTHER; note = 2'-deoxy-2'-fluorouridine-3'-phosphate
  modified_base 7: mod_base = OTHER; note = 2'-O-methyluridine-3'-phosphate
  modified_base 8: mod_base = OTHER; note = 2'-O-methyluridine-3'-phosphate
  modified_base 9: mod_base = OTHER; note = 2'-O-methyluridine-3'-phosphate
  modified_base 10: mod_base = OTHER; note = 2'-O-methylguanosine-3'-phosphate
  modified_base 11: mod_base = OTHER; note = 2'-O-methyladenosine-3'-phosphate
  modified_base 12: mod_base = OTHER; note = 2'-deoxy-2'-fluoroadenosine-3'-phosphate
  modified_base 13: mod_base = OTHER; note = 2'-O-methylguanosine-3'-phosphate
  modified_base 14: mod_base = OTHER; note = 2'-deoxy-2'-fluoroadenosine-3'-phosphate
  modified_base 15: mod_base = OTHER; note = 2'-O-methyluridine-3'-phosphate
  modified_base 16: mod_base = OTHER; note = 2'-deoxy-2'-fluorocytidine-3'-phosphate
  modified_base 17: mod_base = OTHER; note = 2'-O-methyluridine-3'-phosphate
  modified_base 18: mod_base = OTHER; note = 2'-O-methylguanosine-3'-phosphate
  modified_base 19: mod_base = OTHER; note = 2'-O-methyladenosine-3'-phosphate
  modified_base 20: mod_base = OTHER; note = 2'-O-methylcytidine-3'-phosphate
  modified_base 21: mod_base = OTHER; note = 2'-O-methylcytidine-3'-phosphorothioate
  modified_base 22: mod_base = OTHER; note = 2'-O-methyladenosine-3'-phosphorothioate
  modified_base 23: mod_base = OTHER; note = 2'-O-methyluridine
ttttattttgaagatctgaccat

SEQ ID NO: 121 - RNA, 23 nt, synthetic construct
  source 1..23: mol_type = other RNA
  modified_base 2: mod_base = OTHER; note = 5'-methyluridine-3'-phosphate
  modified_base 5: mod_base = OTHER; note = 5'-methyluridine-3'-phosphate
  modified_base 10: mod_base = OTHER; note = 5'-methyluridine-3'-phosphate
  modified_base 12: mod_base = OTHER; note = 5'-methyluridine-3'-phosphate
  modified_base 13: mod_base = OTHER; note = 5'-methyluridine-3'-phosphate
  modified_base 19: mod_base = OTHER; note = 5'-methyluridine-3'-phosphate
atggtcagatcttcaaaataaaa

SEQ ID NO: 122 - RNA, 21 nt, synthetic construct
  source 1..21: mol_type = other RNA
  modified_base 1: mod_base = OTHER; note = 2'-O-methylguanosine-3'-phosphorothioate
  modified_base 2: mod_base = OTHER; note = 2'-O-methylguanosine-3'-phosphorothioate
  modified_base 3: mod_base = OTHER; note = 2'-O-methyluridine-3'-phosphate
  modified_base 4: mod_base = OTHER; note = 2'-O-methylcytidine-3'-phosphate
  modified_base 5: mod_base = OTHER; note = 2'-O-methyladenosine-3'-phosphate
  modified_base 6: mod_base = OTHER; note = 2'-O-methylguanosine-3'-phosphate
  modified_base 7: mod_base = OTHER; note = 2'-deoxy-2'-fluoroadenosine-3'-phosphate
  modified_base 8: mod_base = OTHER; note = 2'-O-methyluridine-3'-phosphate
  modified_base 9: mod_base = OTHER; note = 2'-deoxy-2'-fluorocytidine-3'-phosphate
  modified_base 10: mod_base = OTHER; note = 2'-deoxy-2'-fluorouridine-3'-phosphate
  modified_base 11: mod_base = OTHER; note = 2'-deoxy-2'-fluorouridine-3'-phosphate
  modified_base 12: mod_base = OTHER; note = 2'-O-methylcytidine-3'-phosphate
  modified_base 13: mod_base = OTHER; note = 2'-O-methyladenosine-3'-phosphate
  modified_base 14: mod_base = OTHER; note = 2'-O-methyladenosine-3'-phosphate
  modified_base 15: mod_base = OTHER; note = 2'-O-methyladenosine-3'-phosphate
  modified_base 16: mod_base = OTHER; note = 2'-O-methyladenosine-3'-phosphate
  modified_base 17: mod_base = OTHER; note = 2'-O-methyluridine-3'-phosphate
  modified_base 18: mod_base = OTHER; note = 2'-O-methyladenosine-3'-phosphate
  modified_base 19: mod_base = OTHER; note = 2'-O-methyladenosine-3'-phosphate
  modified_base 20: mod_base = OTHER; note = 2'-O-methyladenosine-3'-phosphate
  modified_base 21: mod_base = OTHER; note = 2'-O-methyladenosine-3'-phosphate ((2S,4R)-1-[29-[[2-(acetylamino)-2-deoxy-beta-D-galactopyra nosyl]oxy]-14,14-bis[[3-[[3-[[5-[[2-(acetylamino)-2-deoxy-b eta-D-galactopyranosyl]oxy]-1-oxopentyl]amino]propyl]amino] -3-oxopropoxy]methyl]-1,12,19,25-tetraoxo-16-oxa-13,20,24-t riazanonacos-1-yl]-4-hydroxy-2-pyrrolidinyl)methyl ester
ggtcagatcttcaaaataaaa

SEQ ID NO: 123 - RNA, 23 nt, synthetic construct
  source 1..23: mol_type = other RNA
  modified_base 1: mod_base = OTHER; note = 2'-O-methyluridine-3'-phosphorothioate
  modified_base 2: mod_base = OTHER; note = 2'-deoxy-2'-fluorouridine-3'-phosphorothioate
  modified_base 3: mod_base = OTHER; note = 2'-O-methyluridine-3'-phosphate
  modified_base 4: mod_base = OTHER; note = 2'-O-methyluridine-3'-phosphate
  modified_base 5: mod_base = OTHER; note = 2'-O-methyladenosine-3'-phosphate
  modified_base 6: mod_base = OTHER; note = 2'-deoxy-2'-fluorouridine-3'-phosphate
  modified_base 7: mod_base = OTHER; note = 2'-O-methyluridine-3'-phosphate
  modified_base 8: mod_base = OTHER; note = 2'-O-methyluridine-3'-phosphate
  modified_base 9: mod_base = OTHER; note = 2'-O-methyluridine-3'-phosphate
  modified_base 10: mod_base = OTHER; note = 2'-O-methylguanosine-3'-phosphate
  modified_base 11: mod_base = OTHER; note = 2'-O-methyladenosine-3'-phosphate
  modified_base 12: mod_base = OTHER; note = 2'-deoxy-2'-fluoroadenosine-3'-phosphate
  modified_base 13: mod_base = OTHER; note = 2'-O-methylguanosine-3'-phosphate
  modified_base 14: mod_base = OTHER; note = 2'-deoxy-2'-fluoroadenosine-3'-phosphate
  modified_base 15: mod_base = OTHER; note = 2'-O-methyluridine-3'-phosphate
  modified_base 16: mod_base = OTHER; note = 2'-deoxy-2'-fluorocytidine-3'-phosphate
  modified_base 17: mod_base = OTHER; note = 2'-O-methyluridine-3'-phosphate
  modified_base 18: mod_base = OTHER; note = 2'-O-methylguanosine-3'-phosphate
  modified_base 19: mod_base = OTHER; note = 2'-O-methyladenosine-3'-phosphate
  modified_base 20: mod_base = OTHER; note = 2'-O-methylcytidine-3'-phosphate
  modified_base 21: mod_base = OTHER; note = 2'-O-methylcytidine-3'-phosphorothioate
  modified_base 22: mod_base = OTHER; note = 2'-O-methylguanosine-3'-phosphorothioate
  modified_base 23: mod_base = OTHER; note = 2'-O-methyluridine
ttttattttgaagatctgaccgt

SEQ ID NO: 124 - RNA, 23 nt, synthetic construct
  source 1..23: mol_type = other RNA
  modified_base 5: mod_base = OTHER; note = 5'-methyluridine-3'-phosphate
  modified_base 10: mod_base = OTHER; note = 5'-methyluridine-3'-phosphate
  modified_base 12: mod_base = OTHER; note = 5'-methyluridine-3'-phosphate
  modified_base 13: mod_base = OTHER; note = 5'-methyluridine-3'-phosphate
  modified_base 19: mod_base = OTHER; note = 5'-methyluridine-3'-phosphate
acggtcagatcttcaaaataaaa

SEQ ID NO: 125 - RNA, 21 nt, synthetic construct
  source 1..21: mol_type = other RNA
  modified_base 1: mod_base = OTHER; note = 2'-O-methylguanosine-3'-phosphorothioate
  modified_base 2: mod_base = OTHER; note = 2'-O-methylguanosine-3'-phosphorothioate
  modified_base 3: mod_base = OTHER; note = 2'-O-methyluridine-3'-phosphate
  modified_base 4: mod_base = OTHER; note = 2'-O-methylcytidine-3'-phosphate
  modified_base 5: mod_base = OTHER; note = 2'-O-methyladenosine-3'-phosphate
  modified_base 6: mod_base = OTHER; note = 2'-O-methylguanosine-3'-phosphate
  modified_base 7: mod_base = OTHER; note = 2'-deoxy-2'-fluoroadenosine-3'-phosphate
  modified_base 8: mod_base = OTHER; note = 2'-O-methyluridine-3'-phosphate
  modified_base 9: mod_base = OTHER; note = 2'-deoxy-2'-fluorocytidine-3'-phosphate
  modified_base 10: mod_base = OTHER; note = 2'-deoxy-2'-fluorouridine-3'-phosphate
  modified_base 11: mod_base = OTHER; note = 2'-deoxy-2'-fluorouridine-3'-phosphate
  modified_base 12: mod_base = OTHER; note = 2'-O-methylcytidine-3'-phosphate
  modified_base 13: mod_base = OTHER; note = 2'-O-methyladenosine-3'-phosphate
  modified_base 14: mod_base = OTHER; note = 2'-O-methyladenosine-3'-phosphate
  modified_base 15: mod_base = OTHER; note = 2'-O-methyladenosine-3'-phosphate
  modified_base 16: mod_base = OTHER; note = 2'-O-methyladenosine-3'-phosphate
  modified_base 17: mod_base = OTHER; note = 2'-O-methyluridine-3'-phosphate
  modified_base 18: mod_base = OTHER; note = 2'-O-methyladenosine-3'-phosphate
  modified_base 19: mod_base = OTHER; note = 2'-O-methyladenosine-3'-phosphate
  modified_base 20: mod_base = OTHER; note = 2'-O-methyladenosine-3'-phosphate
  modified_base 21: mod_base = OTHER; note = 2'-O-methyladenosine-3'-phosphate ((2S,4R)-1-[29-[[2-(acetylamino)-2-deoxy-beta-D-galactopyra nosyl]oxy]-14,14-bis[[3-[[3-[[5-[[2-(acetylamino)-2-deoxy-b eta-D-galactopyranosyl]oxy]-1-oxopentyl]amino]propyl]amino] -3-oxopropoxy]methyl]-1,12,19,25-tetraoxo-16-oxa-13,20,24-t riazanonacos-1-yl]-4-hydroxy-2-pyrrolidinyl)methyl ester
ggtcagatcttcaaaataaaa

SEQ ID NO: 126 - RNA, 23 nt, synthetic construct
  source 1..23: mol_type = other RNA
  modified_base 1: mod_base = OTHER; note = 2'-O-methyluridine-3'-phosphorothioate
  modified_base 2: mod_base = OTHER; note = 2'-deoxy-2'-fluorouridine-3'-phosphorothioate
  modified_base 3: mod_base = OTHER; note = 2'-O-methyluridine-3'-phosphate
  modified_base 4: mod_base = OTHER; note = 2'-O-methyluridine-3'-phosphate
  modified_base 5: mod_base = OTHER; note = 2'-O-methyladenosine-3'-phosphate
  modified_base 6: mod_base = OTHER; note = 2'-deoxy-2'-fluorouridine-3'-phosphate
  modified_base 7: mod_base = OTHER; note = 2'-O-methyluridine-3'-phosphate
  modified_base 8: mod_base = OTHER; note = 2'-O-methyluridine-3'-phosphate
  modified_base 9: mod_base = OTHER; note = 2'-O-methyluridine-3'-phosphate
  modified_base 10: mod_base = OTHER; note = 2'-O-methylguanosine-3'-phosphate
  modified_base 11: mod_base = OTHER; note = 2'-O-methyladenosine-3'-phosphate
  modified_base 12: mod_base = OTHER; note = 2'-deoxy-2'-fluoroadenosine-3'-phosphate
  modified_base 13: mod_base = OTHER; note = 2'-O-methylguanosine-3'-phosphate
  modified_base 14: mod_base = OTHER; note = 2'-deoxy-2'-fluoroadenosine-3'-phosphate
  modified_base 15: mod_base = OTHER; note = 2'-O-methyluridine-3'-phosphate
  modified_base 16: mod_base = OTHER; note = 2'-deoxy-2'-fluorocytidine-3'-phosphate
  modified_base 17: mod_base = OTHER; note = 2'-O-methyluridine-3'-phosphate
  modified_base 18: mod_base = OTHER; note = 2'-O-methylguanosine-3'-phosphate
  modified_base 19: mod_base = OTHER; note = 2'-O-methyladenosine-3'-phosphate
  modified_base 20: mod_base = OTHER; note = 2'-O-methylcytidine-3'-phosphate
  modified_base 21: mod_base = OTHER; note = 2'-O-methylcytidine-3'-phosphorothioate
  modified_base 22: mod_base = OTHER; note = 2'-O-methylcytidine-3'-phosphorothioate
  modified_base 23: mod_base = OTHER; note = 2'-O-methyluridine
ttttattttgaagatctgaccct

SEQ ID NO: 127 - RNA, 23 nt, synthetic construct
  source 1..23: mol_type = other RNA
  modified_base 5: mod_base = OTHER; note = 5'-methyluridine-3'-phosphate
  modified_base 10: mod_base = OTHER; note = 5'-methyluridine-3'-phosphate
  modified_base 12: mod_base = OTHER; note = 5'-methyluridine-3'-phosphate
  modified_base 13: mod_base = OTHER; note = 5'-methyluridine-3'-phosphate
  modified_base 19: mod_base = OTHER; note = 5'-methyluridine-3'-phosphate
agggtcagatcttcaaaataaaa

SEQ ID NO: 128 - RNA, 21 nt, synthetic construct
  source 1..21: mol_type = other RNA
  modified_base 1: mod_base = OTHER; note = 2'-O-methylguanosine-3'-phosphorothioate
  modified_base 2: mod_base = OTHER; note = 2'-O-methylguanosine-3'-phosphorothioate
  modified_base 3: mod_base = OTHER; note = 2'-O-methyluridine-3'-phosphate
  modified_base 4: mod_base = OTHER; note = 2'-O-methylcytidine-3'-phosphate
  modified_base 5: mod_base = OTHER; note = 2'-O-methyladenosine-3'-phosphate
  modified_base 6: mod_base = OTHER; note = 2'-O-methylguanosine-3'-phosphate
  modified_base 7: mod_base = OTHER; note = 2'-deoxy-2'-fluoroadenosine-3'-phosphate
  modified_base 8: mod_base = OTHER; note = 2'-O-methyluridine-3'-phosphate
  modified_base 9: mod_base = OTHER; note = 2'-deoxy-2'-fluorocytidine-3'-phosphate
  modified_base 10: mod_base = OTHER; note = 2'-deoxy-2'-fluorouridine-3'-phosphate
  modified_base 11: mod_base = OTHER; note = 2'-deoxy-2'-fluorouridine-3'-phosphate
  modified_base 12: mod_base = OTHER; note = 2'-O-methylcytidine-3'-phosphate
  modified_base 13: mod_base = OTHER; note = 2'-O-methyladenosine-3'-phosphate
  modified_base 14: mod_base = OTHER; note = 2'-O-methyladenosine-3'-phosphate
  modified_base 15: mod_base = OTHER; note = 2'-O-methyladenosine-3'-phosphate
  modified_base 16: mod_base = OTHER; note = 2'-O-methyladenosine-3'-phosphate
  modified_base 17: mod_base = OTHER; note = 2'-O-methyluridine-3'-phosphate
  modified_base 18: mod_base = OTHER; note = 2'-O-methyladenosine-3'-phosphate
  modified_base 19: mod_base = OTHER; note = 2'-O-methyladenosine-3'-phosphate
  modified_base 20: mod_base = OTHER; note = 2'-O-methyladenosine-3'-phosphate
  modified_base 21: mod_base = OTHER; note = 2'-O-methyladenosine-3'-phosphate ((2S,4R)-1-[29-[[2-(acetylamino)-2-deoxy-beta-D-galactopyra nosyl]oxy]-14,14-bis[[3-[[3-[[5-[[2-(acetylamino)-2-deoxy-b eta-D-galactopyranosyl]oxy]-1-oxopentyl]amino]propyl]amino] -3-oxopropoxy]methyl]-1,12,19,25-tetraoxo-16-oxa-13,20,24-t riazanonacos-1-yl]-4-hydroxy-2-pyrrolidinyl)methyl ester
ggtcagatcttcaaaataaaa

SEQ ID NO: 129 - RNA, 23 nt, synthetic construct
  source 1..23: mol_type = other RNA
  modified_base 1: mod_base = OTHER; note = 2'-O-methyluridine-3'-phosphorothioate
  modified_base 2: mod_base = OTHER; note = 2'-deoxy-2'-fluorouridine-3'-phosphorothioate
  modified_base 3: mod_base = OTHER; note = 2'-O-methyluridine-3'-phosphate
  modified_base 4: mod_base = OTHER; note = 2'-O-methyluridine-3'-phosphate
  modified_base 5: mod_base = OTHER; note = 2'-O-methyladenosine-3'-phosphate
  modified_base 6: mod_base = OTHER; note = 2'-deoxy-2'-fluorouridine-3'-phosphate
  modified_base 7: mod_base = OTHER; note = 2'-O-methyluridine-3'-phosphate
  modified_base 8: mod_base = OTHER; note = 2'-O-methyluridine-3'-phosphate
  modified_base 9: mod_base = OTHER; note = 2'-O-methyluridine-3'-phosphate
  modified_base 10: mod_base = OTHER; note = 2'-O-methylguanosine-3'-phosphate
  modified_base 11: mod_base = OTHER; note = 2'-O-methyladenosine-3'-phosphate
  modified_base 12: mod_base = OTHER; note = 2'-deoxy-2'-fluoroadenosine-3'-phosphate
  modified_base 13: mod_base = OTHER; note = 2'-O-methylguanosine-3'-phosphate
  modified_base 14: mod_base = OTHER; note = 2'-deoxy-2'-fluoroadenosine-3'-phosphate
  modified_base 15: mod_base = OTHER; note = 2'-O-methyluridine-3'-phosphate
  modified_base 16: mod_base = OTHER; note = 2'-deoxy-2'-fluorocytidine-3'-phosphate
  modified_base 17: mod_base = OTHER; note = 2'-O-methyluridine-3'-phosphate
  modified_base 18: mod_base = OTHER; note = 2'-O-methylguanosine-3'-phosphate
  modified_base 19: mod_base = OTHER; note = 2'-O-methyladenosine-3'-phosphate
  modified_base 20: mod_base = OTHER; note = 2'-O-methylcytidine-3'-phosphate
  modified_base 21: mod_base = OTHER; note = 2'-O-methylcytidine-3'-phosphorothioate
  modified_base 22: mod_base = OTHER; note = 2'-O-methylguanosine-3'-phosphorothioate
  modified_base 23: mod_base = OTHER; note = 2'-O-methylguanosine
ttttattttgaagatctgaccgg

SEQ ID NO: 130 - RNA, 23 nt, synthetic construct
  source 1..23: mol_type = other RNA
  modified_base 5: mod_base = OTHER; note = 5'-methyluridine-3'-phosphate
  modified_base 10: mod_base = OTHER; note = 5'-methyluridine-3'-phosphate
  modified_base 12: mod_base = OTHER; note = 5'-methyluridine-3'-phosphate
  modified_base 13: mod_base = OTHER; note = 5'-methyluridine-3'-phosphate
  modified_base 19: mod_base = OTHER; note = 5'-methyluridine-3'-phosphate
ccggtcagatcttcaaaataaaa

SEQ ID NO: 131 - RNA, 19 nt, synthetic construct
  source 1..19: mol_type = other RNA
  modified_base 1: mod_base = OTHER; note = 2'-O-methyluridine-3'-phosphorothioate
  modified_base 2: mod_base = OTHER; note = 2'-O-methylcytidine-3'-phosphorothioate
  modified_base 3: mod_base = OTHER; note = 2'-O-methyladenosine-3'-phosphate
  modified_base 4: mod_base = OTHER; note = 2'-O-methylguanosine-3'-phosphate
  modified_base 5: mod_base = OTHER; note = 2'-deoxy-2'-fluoroadenosine-3'-phosphate
  modified_base 6: mod_base = OTHER; note = 2'-O-methyluridine-3'-phosphate
  modified_base 7: mod_base = OTHER; note = 2'-deoxy-2'-fluorocytidine-3'-phosphate
  modified_base 8: mod_base = OTHER; note = 2'-deoxy-2'-fluorouridine-3'-phosphate
  modified_base 9: mod_base = OTHER; note = 2'-deoxy-2'-fluorouridine-3'-phosphate
  modified_base 10: mod_base = OTHER; note = 2'-O-methylcytidine-3'-phosphate
  modified_base 11: mod_base = OTHER; note = 2'-O-methyladenosine-3'-phosphate
  modified_base 12: mod_base = OTHER; note = 2'-O-methyladenosine-3'-phosphate
  modified_base 13: mod_base = OTHER; note = 2'-O-methyladenosine-3'-phosphate
  modified_base 14: mod_base = OTHER; note = 2'-O-methyladenosine-3'-phosphate
  modified_base 15: mod_base = OTHER; note = 2'-O-methyluridine-3'-phosphate
  modified_base 16: mod_base = OTHER; note = 2'-O-methyladenosine-3'-phosphate
  modified_base 17: mod_base = OTHER; note = 2'-O-methyladenosine-3'-phosphate
  modified_base 18: mod_base = OTHER; note = 2'-O-methyladenosine-3'-phosphate
  modified_base 19: mod_base = OTHER; note = 2'-O-methyladenosine-3'-phosphate ((2S,4R)-1-[29-[[2-(acetylamino)-2-deoxy-beta-D-galactopyra nosyl]oxy]-14,14-bis[[3-[[3-[[5-[[2-(acetylamino)-2-deoxy-b eta-D-galactopyranosyl]oxy]-1-oxopentyl]amino]propyl]amino] -3-oxopropoxy]methyl]-1,12,19,25-tetraoxo-16-oxa-13,20,24-t riazanonacos-1-yl]-4-hydroxy-2-pyrrolidinyl)methyl ester
tcagatcttcaaaataaaa

SEQ ID NO: 132 - RNA, 21 nt, synthetic construct
  source 1..21: mol_type = other RNA
  modified_base 1: mod_base = OTHER; note = 2'-O-methyluridine-3'-phosphorothioate
  modified_base 2: mod_base = OTHER; note = 2'-deoxy-2'-fluorouridine-3'-phosphorothioate
  modified_base 3: mod_base = OTHER; note = 2'-O-methyluridine-3'-phosphate
  modified_base 4: mod_base = OTHER; note = 2'-O-methyluridine-3'-phosphate
  modified_base 5: mod_base = OTHER; note = 2'-O-methyladenosine-3'-phosphate
  modified_base 6: mod_base = OTHER; note = 2'-deoxy-2'-fluorouridine-3'-phosphate
  modified_base 7: mod_base = OTHER; note = 2'-O-methyluridine-3'-phosphate
  modified_base 8: mod_base = OTHER; note = 2'-O-methyluridine-3'-phosphate
  modified_base 9: mod_base = OTHER; note = 2'-O-methyluridine-3'-phosphate
  modified_base 10: mod_base = OTHER; note = 2'-O-methylguanosine-3'-phosphate
  modified_base 11: mod_base = OTHER; note = 2'-O-methyladenosine-3'-phosphate
  modified_base 12: mod_base = OTHER; note = 2'-deoxy-2'-fluoroadenosine-3'-phosphate
  modified_base 13: mod_base = OTHER; note = 2'-O-methylguanosine-3'-phosphate
  modified_base 14: mod_base = OTHER; note = 2'-deoxy-2'-fluoroadenosine-3'-phosphate
  modified_base 15: mod_base = OTHER; note = 2'-O-methyluridine-3'-phosphate
  modified_base 16: mod_base = OTHER; note = 2'-deoxy-2'-fluorocytidine-3'-phosphate
  modified_base 17: mod_base = OTHER; note = 2'-O-methyluridine-3'-phosphate
  modified_base 18: mod_base = OTHER; note = 2'-O-methylguanosine-3'-phosphate
  modified_base 19: mod_base = OTHER; note = 2'-O-methyladenosine-3'-phosphorothioate
  modified_base 20: mod_base = OTHER; note = 2'-O-methylcytidine-3'-phosphorothioate
  modified_base 21: mod_base = OTHER; note = 2'-O-methylcytidine
ttttattttgaagatctgacc

SEQ ID NO: 133 - RNA, 21 nt, synthetic construct
  source 1..21: mol_type = other RNA
  modified_base 3: mod_base = OTHER; note = 5'-methyluridine-3'-phosphate
  modified_base 8: mod_base = OTHER; note = 5'-methyluridine-3'-phosphate
  modified_base 10: mod_base = OTHER; note = 5'-methyluridine-3'-phosphate
  modified_base 11: mod_base = OTHER; note = 5'-methyluridine-3'-phosphate
  modified_base 17: mod_base = OTHER; note = 5'-methyluridine-3'-phosphate
ggtcagatcttcaaaataaaa

SEQ ID NO: 134 - RNA, 21 nt, synthetic construct
  source 1..21: mol_type = other RNA
  modified_base 1: mod_base = OTHER; note = 2'-O-methylguanosine-3'-phosphorothioate
  modified_base 2: mod_base = OTHER; note = 2'-O-methylguanosine-3'-phosphorothioate
  modified_base 3: mod_base = OTHER; note = 2'-O-methyluridine-3'-phosphate
  modified_base 4: mod_base = OTHER; note = 2'-O-methylcytidine-3'-phosphate
  modified_base 5: mod_base = OTHER; note = 2'-O-methyladenosine-3'-phosphate
  modified_base 6: mod_base = OTHER; note = 2'-O-methylguanosine-3'-phosphate
  modified_base 7: mod_base = OTHER; note = 2'-deoxy-2'-fluoroadenosine-3'-phosphate
  modified_base 8: mod_base = OTHER; note = 2'-O-methyluridine-3'-phosphate
  modified_base 9: mod_base = OTHER; note = 2'-deoxy-2'-fluorocytidine-3'-phosphate
  modified_base 10: mod_base = OTHER; note = 2'-deoxy-2'-fluorouridine-3'-phosphate
  modified_base 11: mod_base = OTHER; note = 2'-deoxy-2'-fluorouridine-3'-phosphate
  modified_base 12: mod_base = OTHER; note = 2'-O-methylcytidine-3'-phosphate
  modified_base 13: mod_base = OTHER; note = 2'-O-methyladenosine-3'-phosphate
  modified_base 14: mod_base = OTHER; note = 2'-O-methyladenosine-3'-phosphate
  modified_base 15: mod_base = OTHER; note = 2'-O-methyladenosine-3'-phosphate
  modified_base 16: mod_base = OTHER; note = 2'-O-methyladenosine-3'-phosphate
  modified_base 17: mod_base = OTHER; note = 2'-O-methyluridine-3'-phosphate
  modified_base 18: mod_base = OTHER; note = 2'-O-methyladenosine-3'-phosphate
  modified_base 19: mod_base = OTHER; note = 2'-O-methyladenosine-3'-phosphate
  modified_base 20: mod_base = OTHER; note = 2'-O-methyladenosine-3'-phosphate
  modified_base 21: mod_base = OTHER; note = 2'-O-methyluridine-3'-phosphate ((2S,4R)-1-[29-[[2-(acetylamino)-2-deoxy-beta-D-galactopyra nosyl]oxy]-14,14-bis[[3-[[3-[[5-[[2-(acetylamino)-2-deoxy-b eta-D-galactopyranosyl]oxy]-1-oxopentyl]amino]propyl]amino] -3-oxopropoxy]methyl]-1,12,19,25-tetraoxo-16-oxa-13,20,24-t riazanonacos-1-yl]-4-hydroxy-2-pyrrolidinyl)methyl ester
ggtcagatcttcaaaataaat

SEQ ID NO: 135 - RNA, 23 nt, synthetic construct
  source 1..23: mol_type = other RNA
  modified_base 1: mod_base = OTHER; note = 2'-O-methyladenosine-3'-phosphorothioate
  modified_base 2: mod_base = OTHER; note = 2'-deoxy-2'-fluorouridine-3'-phosphorothioate
  modified_base 3: mod_base = OTHER; note = 2'-O-methyluridine-3'-phosphate
  modified_base 4: mod_base = OTHER; note = 2'-O-methyluridine-3'-phosphate
  modified_base 5: mod_base = OTHER; note = 2'-O-methyladenosine-3'-phosphate
  modified_base 6: mod_base = OTHER; note = 2'-deoxy-2'-fluorouridine-3'-phosphate
  modified_base 7: mod_base = OTHER; note = 2'-O-methyluridine-3'-phosphate
  modified_base 8: mod_base = OTHER; note = 2'-deoxy-2'-fluorouridine-3'-phosphate
  modified_base 9: mod_base = OTHER; note = 2'-deoxy-2'-fluorouridine-3'-phosphate
  modified_base 10: mod_base = OTHER; note = 2'-O-methylguanosine-3'-phosphate
  modified_base 11: mod_base = OTHER; note = 2'-O-methyladenosine-3'-phosphate
  modified_base 12: mod_base = OTHER; note = 2'-O-methyladenosine-3'-phosphate
  modified_base 13: mod_base = OTHER; note = 2'-O-methylguanosine-3'-phosphate
  modified_base 14: mod_base = OTHER; note = 2'-deoxy-2'-fluoroadenosine-3'-phosphate
  modified_base 15: mod_base = OTHER; note = 2'-O-methyluridine-3'-phosphate
  modified_base 16: mod_base = OTHER; note = 2'-deoxy-2'-fluorocytidine-3'-phosphate
  modified_base 17: mod_base = OTHER; note = 2'-O-methyluridine-3'-phosphate
  modified_base 18: mod_base = OTHER; note = 2'-O-methylguanosine-3'-phosphate
  modified_base 19: mod_base = OTHER; note = 2'-O-methyladenosine-3'-phosphate
  modified_base 20: mod_base = OTHER; note = 2'-O-methylcytidine-3'-phosphate
  modified_base 21: mod_base = OTHER; note = 2'-O-methylcytidine-3'-phosphorothioate
  modified_base 22: mod_base = OTHER; note = 2'-O-methyladenosine-3'-phosphorothioate
  modified_base 23: mod_base = OTHER; note = 2'-O-methyluridine
atttattttgaagatctgaccat

SEQ ID NO: 136 - RNA, 23 nt, synthetic construct
  source 1..23: mol_type = other RNA
  modified_base 2: mod_base = OTHER; note = 5'-methyluridine-3'-phosphate
  modified_base 5: mod_base = OTHER; note = 5'-methyluridine-3'-phosphate
  modified_base 10: mod_base = OTHER; note = 5'-methyluridine-3'-phosphate
  modified_base 12: mod_base = OTHER; note = 5'-methyluridine-3'-phosphate
  modified_base 13: mod_base = OTHER; note = 5'-methyluridine-3'-phosphate
  modified_base 19: mod_base = OTHER; note = 5'-methyluridine-3'-phosphate
  modified_base 23: mod_base = OTHER; note = 5'-methyluridine
atggtcagatcttcaaaataaat

SEQ ID NO: 137 - RNA, 21 nt, synthetic construct
  source 1..21: mol_type = other RNA
  modified_base 1: mod_base = OTHER; note = 2'-O-methylguanosine-3'-phosphorothioate
  modified_base 2: mod_base = OTHER; note = 2'-O-methylguanosine-3'-phosphorothioate
  modified_base 3: mod_base = OTHER; note = 2'-O-methyluridine-3'-phosphate
  modified_base 4: mod_base = OTHER; note = 2'-O-methylcytidine-3'-phosphate
  modified_base 5: mod_base = OTHER; note = 2'-O-methyladenosine-3'-phosphate
  modified_base 6: mod_base = OTHER; note = 2'-O-methylguanosine-3'-phosphate
  modified_base 7: mod_base = OTHER; note = 2'-deoxy-2'-fluoroadenosine-3'-phosphate
  modified_base 8: mod_base = OTHER; note = 2'-O-methyluridine-3'-phosphate
  modified_base 9: mod_base = OTHER; note = 2'-deoxy-2'-fluorocytidine-3'-phosphate
  modified_base 10: mod_base = OTHER; note = 2'-deoxy-2'-fluorouridine-3'-phosphate
  modified_base 11: mod_base = OTHER; note = 2'-deoxy-2'-fluorouridine-3'-phosphate
  modified_base 12: mod_base = OTHER; note = 2'-O-methylcytidine-3'-phosphate
  modified_base 13: mod_base = OTHER; note = 2'-O-methyladenosine-3'-phosphate
  modified_base 14: mod_base = OTHER; note = 2'-O-methyladenosine-3'-phosphate
  modified_base 15: mod_base = OTHER; note = 2'-O-methyladenosine-3'-phosphate
  modified_base 16: mod_base = OTHER; note = 2'-O-methyladenosine-3'-phosphate
  modified_base 17: mod_base = OTHER; note = 2'-O-methyluridine-3'-phosphate
  modified_base 18: mod_base = OTHER; note = 2'-O-methyladenosine-3'-phosphate
  modified_base 19: mod_base = OTHER; note = 2'-O-methyladenosine-3'-phosphate
  modified_base 20: mod_base = OTHER; note = 2'-O-methyladenosine-3'-phosphate
  modified_base 21: mod_base = OTHER; note = 2'-O-methyluridine-3'-phosphate ((2S,4R)-1-[29-[[2-(acetylamino)-2-deoxy-beta-D-galactopyra nosyl]oxy]-14,14-bis[[3-[[3-[[5-[[2-(acetylamino)-2-deoxy-b eta-D-galactopyranosyl]oxy]-1-oxopentyl]amino]propyl]amino] -3-oxopropoxy]methyl]-1,12,19,25-tetraoxo-16-oxa-13,20,24-t riazanonacos-1-yl]-4-hydroxy-2-pyrrolidinyl)methyl ester
ggtcagatcttcaaaataaat

SEQ ID NO: 138 - RNA, 23 nt, synthetic construct
  source 1..23: mol_type = other RNA
  modified_base 1: mod_base = OTHER; note = 2'-O-methyladenosine-3'-phosphorothioate
  modified_base 2: mod_base = OTHER; note = 2'-deoxy-2'-fluorouridine-3'-phosphorothioate
  modified_base 3: mod_base = OTHER; note = 2'-O-methyluridine-3'-phosphate
  modified_base 4: mod_base = OTHER; note = 2'-O-methyluridine-3'-phosphate
  modified_base 5: mod_base = OTHER; note = 2'-O-methyladenosine-3'-phosphate
  modified_base 6: mod_base = OTHER; note = 2'-deoxy-2'-fluorouridine-3'-phosphate
  modified_base 7: mod_base = OTHER; note = 2'-O-methyluridine-3'-phosphate
  modified_base 8: mod_base = OTHER; note = 2'-deoxy-2'-fluorouridine-3'-phosphate
  modified_base 9: mod_base = OTHER; note = 2'-deoxy-2'-fluorouridine-3'-phosphate
  modified_base 10: mod_base = OTHER; note = 2'-O-methylguanosine-3'-phosphate
  modified_base 11: mod_base = OTHER; note = 2'-O-methyladenosine-3'-phosphate
  modified_base 12: mod_base = OTHER; note = 2'-O-methyladenosine-3'-phosphate
  modified_base 13: mod_base = OTHER; note = 2'-O-methylguanosine-3'-phosphate
  modified_base 14: mod_base = OTHER; note = 2'-deoxy-2'-fluoroadenosine-3'-phosphate
  modified_base 15: mod_base = OTHER; note = 2'-O-methyluridine-3'-phosphate
  modified_base 16: mod_base = OTHER; note = 2'-deoxy-2'-fluorocytidine-3'-phosphate
  modified_base 17: mod_base = OTHER; note = 2'-O-methyluridine-3'-phosphate
  modified_base 18: mod_base = OTHER; note = 2'-O-methylguanosine-3'-phosphate
  modified_base 19: mod_base = OTHER; note = 2'-O-methyladenosine-3'-phosphate
  modified_base 20: mod_base = OTHER; note = 2'-O-methylcytidine-3'-phosphate
  modified_base 21: mod_base = OTHER; note = 2'-O-methylcytidine-3'-phosphorothioate
  modified_base 22: mod_base = OTHER; note = 2'-O-methylguanosine-3'-phosphorothioate
  modified_base 23: mod_base = OTHER; note = 2'-O-methyluridine
atttattttgaagatctgaccgt

SEQ ID NO: 139 - RNA, 23 nt, synthetic construct
  source 1..23: mol_type = other RNA
  modified_base 5: mod_base = OTHER; note = 5'-methyluridine-3'-phosphate
  modified_base 10: mod_base = OTHER; note = 5'-methyluridine-3'-phosphate
  modified_base 12: mod_base = OTHER; note = 5'-methyluridine-3'-phosphate
  modified_base 13: mod_base = OTHER; note = 5'-methyluridine-3'-phosphate
  modified_base 19: mod_base = OTHER; note = 5'-methyluridine-3'-phosphate
  modified_base 23: mod_base = OTHER; note = 5'-methyluridine
acggtcagatcttcaaaataaat

SEQ ID NO: 140 - RNA, 21 nt, synthetic construct
  source 1..21: mol_type = other RNA
  modified_base 1: mod_base = OTHER; note = 2'-O-methylguanosine-3'-phosphorothioate
  modified_base 2: mod_base = OTHER; note = 2'-O-methylguanosine-3'-phosphorothioate
  modified_base 3: mod_base = OTHER; note = 2'-O-methyluridine-3'-phosphate
  modified_base 4: mod_base = OTHER; note = 2'-O-methylcytidine-3'-phosphate
  modified_base 5: mod_base = OTHER; note = 2'-O-methyladenosine-3'-phosphate
  modified_base 6: mod_base = OTHER; note = 2'-O-methylguanosine-3'-phosphate
  modified_base 7: mod_base = OTHER; note = 2'-deoxy-2'-fluoroadenosine-3'-phosphate
  modified_base 8: mod_base = OTHER; note = 2'-O-methyluridine-3'-phosphate
  modified_base 9: mod_base = OTHER; note = 2'-deoxy-2'-fluorocytidine-3'-phosphate
  modified_base 10: mod_base = OTHER; note = 2'-deoxy-2'-fluorouridine-3'-phosphate
  modified_base 11: mod_base = OTHER; note = 2'-deoxy-2'-fluorouridine-3'-phosphate
  modified_base 12: mod_base = OTHER; note = 2'-O-methylcytidine-3'-phosphate
  modified_base 13: mod_base = OTHER; note = 2'-O-methyladenosine-3'-phosphate
  modified_base 14: mod_base = OTHER; note = 2'-O-methyladenosine-3'-phosphate
  modified_base 15: mod_base = OTHER; note = 2'-O-methyladenosine-3'-phosphate
  modified_base 16: mod_base = OTHER; note = 2'-O-methyladenosine-3'-phosphate
  modified_base 17: mod_base = OTHER; note = 2'-O-methyluridine-3'-phosphate
  modified_base 18: mod_base = OTHER; note = 2'-O-methyladenosine-3'-phosphate
  modified_base 19: mod_base = OTHER; note = 2'-O-methyladenosine-3'-phosphate
  modified_base 20: mod_base = OTHER; note = 2'-O-methyladenosine-3'-phosphate
  modified_base 21: mod_base = OTHER; note = 2'-O-methyluridine-3'-phosphate ((2S,4R)-1-[29-[[2-(acetylamino)-2-deoxy-beta-D-galactopyra nosyl]oxy]-14,14-bis[[3-[[3-[[5-[[2-(acetylamino)-2-deoxy-b eta-D-galactopyranosyl]oxy]-1-oxopentyl]amino]propyl]amino] -3-oxopropoxy]methyl]-1,12,19,25-tetraoxo-16-oxa-13,20,24-t riazanonacos-1-yl]-4-hydroxy-2-pyrrolidinyl)methyl ester
ggtcagatcttcaaaataaat

SEQ ID NO: 141 - RNA, 23 nt, synthetic construct
  source 1..23: mol_type = other RNA
  modified_base 1: mod_base = OTHER; note = 2'-O-methyladenosine-3'-phosphorothioate
  modified_base 2: mod_base = OTHER; note = 2'-deoxy-2'-fluorouridine-3'-phosphorothioate
  modified_base 3: mod_base = OTHER; note = 2'-O-methyluridine-3'-phosphate
  modified_base 4: mod_base = OTHER; note = 2'-O-methyluridine-3'-phosphate
  modified_base 5: mod_base = OTHER; note = 2'-O-methyladenosine-3'-phosphate
  modified_base 6: mod_base = OTHER; note = 2'-deoxy-2'-fluorouridine-3'-phosphate
  modified_base 7: mod_base = OTHER; note = 2'-O-methyluridine-3'-phosphate
  modified_base 8: mod_base = OTHER; note = 2'-deoxy-2'-fluorouridine-3'-phosphate
  modified_base 9: mod_base = OTHER; note = 2'-deoxy-2'-fluorouridine-3'-phosphate
  modified_base 10: mod_base = OTHER; note = 2'-O-methylguanosine-3'-phosphate
  modified_base 11: mod_base = OTHER; note = 2'-O-methyladenosine-3'-phosphate
  modified_base 12: mod_base = OTHER; note = 2'-O-methyladenosine-3'-phosphate
  modified_base 13: mod_base = OTHER; note = 2'-O-methylguanosine-3'-phosphate
  modified_base 14: mod_base = OTHER; note = 2'-deoxy-2'-fluoroadenosine-3'-phosphate
  modified_base 15: mod_base = OTHER; note = 2'-O-methyluridine-3'-phosphate
  modified_base 16: mod_base = OTHER; note = 2'-deoxy-2'-fluorocytidine-3'-phosphate
  modified_base 17: mod_base = OTHER; note = 2'-O-methyluridine-3'-phosphate
  modified_base 18: mod_base = OTHER; note = 2'-O-methylguanosine-3'-phosphate
  modified_base 19: mod_base = OTHER; note = 2'-O-methyladenosine-3'-phosphate
  modified_base 20: mod_base = OTHER; note = 2'-O-methylcytidine-3'-phosphate
  modified_base 21: mod_base = OTHER; note = 2'-O-methylcytidine-3'-phosphorothioate
  modified_base 22: mod_base = OTHER; note = 2'-O-methylcytidine-3'-phosphorothioate
  modified_base 23: mod_base = OTHER; note = 2'-O-methyluridine
atttattttgaagatctgaccct

SEQ ID NO: 142 - RNA, 23 nt, synthetic construct
  source 1..23: mol_type = other RNA
  modified_base 5: mod_base = OTHER; note = 5'-methyluridine-3'-phosphate
  modified_base 10: mod_base = OTHER; note = 5'-methyluridine-3'-phosphate
  modified_base 12: mod_base = OTHER; note = 5'-methyluridine-3'-phosphate
  modified_base 13: mod_base = OTHER; note = 5'-methyluridine-3'-phosphate
  modified_base 19: mod_base = OTHER; note = 5'-methyluridine-3'-phosphate
  modified_base 23: mod_base = OTHER; note = 5'-methyluridine
agggtcagatcttcaaaataaat

SEQ ID NO: 143 - RNA, 21 nt, synthetic construct
  source 1..21: mol_type = other RNA
  modified_base 1: mod_base = OTHER; note = 2'-O-methylguanosine-3'-phosphorothioate
  modified_base 2: mod_base = OTHER; note = 2'-O-methylguanosine-3'-phosphorothioate
  modified_base 3: mod_base = OTHER; note = 2'-O-methyluridine-3'-phosphate
  modified_base 4: mod_base = OTHER; note = 2'-O-methylcytidine-3'-phosphate
  modified_base 5: mod_base = OTHER; note = 2'-O-methyladenosine-3'-phosphate
  modified_base 6: mod_base = OTHER; note = 2'-O-methylguanosine-3'-phosphate
  modified_base 7: mod_base = OTHER; note = 2'-deoxy-2'-fluoroadenosine-3'-phosphate
  modified_base 8: mod_base = OTHER; note = 2'-O-methyluridine-3'-phosphate
  modified_base 9: mod_base = OTHER; note = 2'-deoxy-2'-fluorocytidine-3'-phosphate
  modified_base 10: mod_base = OTHER; note = 2'-deoxy-2'-fluorouridine-3'-phosphate
  modified_base 11: mod_base = OTHER; note = 2'-deoxy-2'-fluorouridine-3'-phosphate
  modified_base 12: mod_base = OTHER; note = 2'-O-methylcytidine-3'-phosphate
  modified_base 13: mod_base = OTHER; note = 2'-O-methyladenosine-3'-phosphate
  modified_base 14: mod_base = OTHER; note = 2'-O-methyladenosine-3'-phosphate
  modified_base 15: mod_base = OTHER; note = 2'-O-methyladenosine-3'-phosphate
  modified_base 16: mod_base = OTHER; note = 2'-O-methyladenosine-3'-phosphate
  modified_base 17: mod_base = OTHER; note = 2'-O-methyluridine-3'-phosphate
  modified_base 18: mod_base = OTHER; note = 2'-O-methyladenosine-3'-phosphate
  modified_base 19: mod_base = OTHER; note = 2'-O-methyladenosine-3'-phosphate
  modified_base 20: mod_base = OTHER; note = 2'-O-methyladenosine-3'-phosphate
  modified_base 21: mod_base = OTHER; note = 2'-O-methyluridine-3'-phosphate ((2S,4R)-1-[29-[[2-(acetylamino)-2-deoxy-beta-D-galactopyra nosyl]oxy]-14,14-bis[[3-[[3-[[5-[[2-(acetylamino)-2-deoxy-b eta-D-galactopyranosyl]oxy]-1-oxopentyl]amino]propyl]amino] -3-oxopropoxy]methyl]-1,12,19,25-tetraoxo-16-oxa-13,20,24-t riazanonacos-1-yl]-4-hydroxy-2-pyrrolidinyl)methyl ester
ggtcagatcttcaaaataaat

SEQ ID NO: 144 - RNA, 23 nt, synthetic construct
  source 1..23: mol_type = other RNA
  modified_base 1: mod_base = OTHER; note = 2'-O-methyladenosine-3'-phosphorothioate
  modified_base 2: mod_base = OTHER; note = 2'-deoxy-2'-fluorouridine-3'-phosphorothioate
  modified_base 3: mod_base = OTHER; note = 2'-O-methyluridine-3'-phosphate
  modified_base 4: mod_base = OTHER; note = 2'-O-methyluridine-3'-phosphate
  modified_base 5: mod_base = OTHER; note = 2'-O-methyladenosine-3'-phosphate
  modified_base 6: mod_base = OTHER; note = 2'-deoxy-2'-fluorouridine-3'-phosphate
  modified_base 7: mod_base = OTHER; note = 2'-O-methyluridine-3'-phosphate
  modified_base 8: mod_base = OTHER; note = 2'-deoxy-2'-fluorouridine-3'-phosphate
  modified_base 9: mod_base = OTHER; note = 2'-deoxy-2'-fluorouridine-3'-phosphate
  modified_base 10: mod_base = OTHER; note = 2'-O-methylguanosine-3'-phosphate
  modified_base 11: mod_base = OTHER; note = 2'-O-methyladenosine-3'-phosphate
  modified_base 12: mod_base = OTHER; note = 2'-O-methyladenosine-3'-phosphate
  modified_base 13: mod_base = OTHER; note = 2'-O-methylguanosine-3'-phosphate
  modified_base 14: mod_base = OTHER; note = 2'-deoxy-2'-fluoroadenosine-3'-phosphate
  modified_base 15: mod_base = OTHER; note = 2'-O-methyluridine-3'-phosphate
  modified_base 16: mod_base = OTHER; note = 2'-deoxy-2'-fluorocytidine-3'-phosphate
  modified_base 17: mod_base = OTHER; note = 2'-O-methyluridine-3'-phosphate
  modified_base 18: mod_base = OTHER; note = 2'-O-methylguanosine-3'-phosphate
  modified_base 19: mod_base = OTHER; note = 2'-O-methyladenosine-3'-phosphate
  modified_base 20: mod_base = OTHER; note = 2'-O-methylcytidine-3'-phosphate
  modified_base 21: mod_base = OTHER; note = 2'-O-methylcytidine-3'-phosphorothioate
  modified_base 22: mod_base = OTHER; note = 2'-O-methylguanosine-3'-phosphorothioate
  modified_base 23: mod_base = OTHER; note = 2'-O-methylguanosine
atttattttgaagatctgaccgg

SEQ ID NO: 145 - RNA, 23 nt, synthetic construct
  source 1..23: mol_type = other RNA
  modified_base 5: mod_base = OTHER; note = 5'-methyluridine-3'-phosphate
  modified_base 10: mod_base = OTHER; note = 5'-methyluridine-3'-phosphate
  modified_base 12: mod_base = OTHER; note = 5'-methyluridine-3'-phosphate
  modified_base 13: mod_base = OTHER; note = 5'-methyluridine-3'-phosphate
  modified_base 19: mod_base = OTHER; note = 5'-methyluridine-3'-phosphate
  modified_base 23: mod_base = OTHER; note = 5'-methyluridine
ccggtcagatcttcaaaataaat

SEQ ID NO: 146 - RNA, 19 nt, synthetic construct
  source 1..19: mol_type = other RNA
  modified_base 1: mod_base = OTHER; note = 2'-O-methyluridine-3'-phosphorothioate
  modified_base 2: mod_base = OTHER; note = 2'-O-methylcytidine-3'-phosphorothioate
  modified_base 3: mod_base = OTHER; note = 2'-O-methyladenosine-3'-phosphate
  modified_base 4: mod_base = OTHER; note = 2'-O-methylguanosine-3'-phosphate
  modified_base 5: mod_base = OTHER; note = 2'-deoxy-2'-fluoroadenosine-3'-phosphate
  modified_base 6: mod_base = OTHER; note = 2'-O-methyluridine-3'-phosphate
  modified_base 7: mod_base = OTHER; note = 2'-deoxy-2'-fluorocytidine-3'-phosphate
  modified_base 8: mod_base = OTHER; note = 2'-deoxy-2'-fluorouridine-3'-phosphate
  modified_base 9: mod_base = OTHER; note = 2'-deoxy-2'-fluorouridine-3'-phosphate
  modified_base 10: mod_base = OTHER; note = 2'-O-methylcytidine-3'-phosphate
  modified_base 11: mod_base = OTHER; note = 2'-O-methyladenosine-3'-phosphate
  modified_base 12: mod_base = OTHER; note = 2'-O-methyladenosine-3'-phosphate
  modified_base 13: mod_base = OTHER; note = 2'-O-methyladenosine-3'-phosphate
  modified_base 14: mod_base = OTHER; note = 2'-O-methyladenosine-3'-phosphate
  modified_base 15: mod_base = OTHER; note = 2'-O-methyluridine-3'-phosphate
  modified_base 16: mod_base = OTHER; note = 2'-O-methyladenosine-3'-phosphate
  modified_base 17: mod_base = OTHER; note = 2'-O-methyladenosine-3'-phosphate
  modified_base 18: mod_base = OTHER; note = 2'-O-methyladenosine-3'-phosphate
  modified_base 19: mod_base = OTHER; note = 2'-O-methyluridine-3'-phosphate ((2S,4R)-1-[29-[[2-(acetylamino)-2-deoxy-beta-D-galactopyra nosyl]oxy]-14,14-bis[[3-[[3-[[5-[[2-(acetylamino)-2-deoxy-b eta-D-galactopyranosyl]oxy]-1-oxopentyl]amino]propyl]amino] -3-oxopropoxy]methyl]-1,12,19,25-tetraoxo-16-oxa-13,20,24-t riazanonacos-1-yl]-4-hydroxy-2-pyrrolidinyl)methyl ester
tcagatcttcaaaataaat

SEQ ID NO: 147 - RNA, 21 nt, synthetic construct
  source 1..21: mol_type = other RNA
  modified_base 1: mod_base = OTHER; note = 2'-O-methyladenosine-3'-phosphorothioate
  modified_base 2: mod_base = OTHER; note = 2'-deoxy-2'-fluorouridine-3'-phosphorothioate
  modified_base 3: mod_base = OTHER; note = 2'-O-methyluridine-3'-phosphate
  modified_base 4: mod_base = OTHER; note = 2'-O-methyluridine-3'-phosphate
  modified_base 5: mod_base = OTHER; note = 2'-O-methyladenosine-3'-phosphate
  modified_base 6: mod_base = OTHER; note = 2'-deoxy-2'-fluorouridine-3'-phosphate
  modified_base 7: mod_base = OTHER; note = 2'-O-methyluridine-3'-phosphate
  modified_base 8: mod_base = OTHER; note = 2'-deoxy-2'-fluorouridine-3'-phosphate
  modified_base 9: mod_base = OTHER; note = 2'-deoxy-2'-fluorouridine-3'-phosphate
  modified_base 10: mod_base = OTHER; note = 2'-O-methylguanosine-3'-phosphate
  modified_base 11: mod_base = OTHER; note = 2'-O-methyladenosine-3'-phosphate
  modified_base 12: mod_base = OTHER; note = 2'-O-methyladenosine-3'-phosphate
  modified_base 13: mod_base = OTHER; note = 2'-O-methylguanosine-3'-phosphate
  modified_base 14: mod_base = OTHER; note = 2'-deoxy-2'-fluoroadenosine-3'-phosphate
  modified_base 15: mod_base = OTHER; note = 2'-O-methyluridine-3'-phosphate
  modified_base 16: mod_base = OTHER; note = 2'-deoxy-2'-fluorocytidine-3'-phosphate
  modified_base 17: mod_base = OTHER; note = 2'-O-methyluridine-3'-phosphate
  modified_base 18: mod_base = OTHER; note = 2'-O-methylguanosine-3'-phosphate
  modified_base 19: mod_base = OTHER; note = 2'-O-methyladenosine-3'-phosphorothioate
  modified_base 20: mod_base = OTHER; note = 2'-O-methylcytidine-3'-phosphorothioate
  modified_base 21: mod_base = OTHER; note = 2'-O-methylcytidine
atttattttgaagatctgacc

SEQ ID NO: 148 - RNA, 21 nt, synthetic construct
  source 1..21: mol_type = other RNA
  modified_base 3: mod_base = OTHER; note = 5'-methyluridine-3'-phosphate
  modified_base 8: mod_base = OTHER; note = 5'-methyluridine-3'-phosphate
  modified_base 10: mod_base = OTHER; note = 5'-methyluridine-3'-phosphate
  modified_base 11: mod_base = OTHER; note = 5'-methyluridine-3'-phosphate
  modified_base 17: mod_base = OTHER; note = 5'-methyluridine-3'-phosphate
  modified_base 21: mod_base = OTHER; note = 5'-methyluridine
ggtcagatcttcaaaataaat

SEQ ID NO: 149 - RNA, 21 nt, synthetic construct
  source 1..21: mol_type = other RNA
  modified_base 1: mod_base = OTHER; note = 2'-O-methylguanosine-3'-phosphorothioate
  modified_base 2: mod_base = OTHER; note = 2'-O-methylguanosine-3'-phosphorothioate
  modified_base 3: mod_base = OTHER; note = 2'-O-methyluridine-3'-phosphate
  modified_base 4: mod_base = OTHER; note = 2'-O-methylcytidine-3'-phosphate
  modified_base 5: mod_base = OTHER; note = 2'-O-methyladenosine-3'-phosphate
  modified_base 6: mod_base = OTHER; note = 2'-O-methylguanosine-3'-phosphate
  modified_base 7: mod_base = OTHER; note = 2'-deoxy-2'-fluoroadenosine-3'-phosphate
  modified_base 8: mod_base = OTHER; note = 2'-O-methyluridine-3'-phosphate
  modified_base 9: mod_base = OTHER; note = 2'-deoxy-2'-fluorocytidine-3'-phosphate
  modified_base 10: mod_base = OTHER; note = 2'-deoxy-2'-fluorouridine-3'-phosphate
  modified_base 11: mod_base = OTHER; note = 2'-deoxy-2'-fluorouridine-3'-phosphate
  modified_base 12: mod_base = OTHER; note = 2'-O-methylcytidine-3'-phosphate
  modified_base 13: mod_base = OTHER; note = 2'-O-methyladenosine-3'-phosphate
  modified_base 14: mod_base = OTHER; note = 2'-O-methyladenosine-3'-phosphate
  modified_base 15: mod_base = OTHER; note = 2'-O-methyladenosine-3'-phosphate
  modified_base 16: mod_base = OTHER; note = 2'-O-methyladenosine-3'-phosphate
  modified_base 17: mod_base = OTHER; note = 2'-O-methyluridine-3'-phosphate
  modified_base 18: mod_base = OTHER; note = 2'-O-methyladenosine-3'-phosphate
  modified_base 19: mod_base = OTHER; note = 2'-O-methyladenosine-3'-phosphate
  modified_base 20: mod_base = OTHER; note = 2'-O-methyladenosine-3'-phosphate
  modified_base 21: mod_base = OTHER; note = 2'-O-methyluridine-3'-phosphate ((2S,4R)-1-[29-[[2-(acetylamino)-2-deoxy-beta-D-galactopyra nosyl]oxy]-14,14-bis[[3-[[3-[[5-[[2-(acetylamino)-2-deoxy-b eta-D-galactopyranosyl]oxy]-1-oxopentyl]amino]propyl]amino] -3-oxopropoxy]methyl]-1,12,19,25-tetraoxo-16-oxa-13,20,24-t riazanonacos-1-yl]-4-hydroxy-2-pyrrolidinyl)methyl ester
ggtcagatcttcaaaataaat

SEQ ID NO: 150 - RNA, 23 nt, synthetic construct
  source 1..23: mol_type = other RNA
  modified_base 1: mod_base = OTHER; note = 2'-O-methyladenosine-3'-phosphorothioate
  modified_base 2: mod_base = OTHER; note = 2'-deoxy-2'-fluorouridine-3'-phosphorothioate
  modified_base 3: mod_base = OTHER; note = 2'-O-methyluridine-3'-phosphate
  modified_base 4: mod_base = OTHER; note = 2'-O-methyluridine-3'-phosphate
  modified_base 5: mod_base = OTHER; note = 2'-O-methyladenosine-3'-phosphate
  modified_base 6: mod_base = OTHER; note = 2'-deoxy-2'-fluorouridine-3'-phosphate
  modified_base 7: mod_base = OTHER; note = 2'-O-methyluridine-3'-phosphate
  modified_base 8: mod_base = OTHER; note = 2'-deoxy-2'-fluorouridine-3'-phosphate
  modified_base 9: mod_base = OTHER; note = 2'-deoxy-2'-fluorouridine-3'-phosphate
  modified_base 10: mod_base = OTHER; note = 2'-O-methylguanosine-3'-phosphate
  modified_base 11: mod_base = OTHER; note = 2'-O-methyladenosine-3'-phosphate
  modified_base 12: mod_base = OTHER; note = 2'-deoxy-2'-fluoroadenosine-3'-phosphate
  modified_base 13: mod_base = OTHER; note = 2'-O-methylguanosine-3'-phosphate
  modified_base 14: mod_base = OTHER; note = 2'-deoxy-2'-fluoroadenosine-3'-phosphate
  modified_base 15: mod_base = OTHER; note = 2'-O-methyluridine-3'-phosphate
  modified_base 16: mod_base = OTHER; note = 2'-deoxy-2'-fluorocytidine-3'-phosphate
  modified_base 17: mod_base = OTHER; note = 2'-O-methyluridine-3'-phosphate
  modified_base 18: mod_base = OTHER; note = 2'-O-methylguanosine-3'-phosphate
  modified_base 19: mod_base = OTHER; note = 2'-O-methyladenosine-3'-phosphate
  modified_base 20: mod_base = OTHER; note = 2'-O-methylcytidine-3'-phosphate
  modified_base 21: mod_base = OTHER; note = 2'-O-methylcytidine-3'-phosphorothioate
  modified_base 22: mod_base = OTHER; note = 2'-O-methyladenosine-3'-phosphorothioate
  modified_base 23: mod_base = OTHER; note = 2'-O-methyluridine
atttattttgaagatctgaccat

SEQ ID NO: 151 - RNA, 23 nt, synthetic construct
  source 1..23: mol_type = other RNA
  modified_base 2: mod_base = OTHER; note = 5'-methyluridine-3'-phosphate
  modified_base 5: mod_base = OTHER; note = 5'-methyluridine-3'-phosphate
  modified_base 10: mod_base = OTHER; note = 5'-methyluridine-3'-phosphate
  modified_base 12: mod_base = OTHER; note = 5'-methyluridine-3'-phosphate
  modified_base 13: mod_base = OTHER; note = 5'-methyluridine-3'-phosphate
  modified_base 19: mod_base = OTHER; note = 5'-methyluridine-3'-phosphate
  modified_base 23: mod_base = OTHER; note = 5'-methyluridine
atggtcagatcttcaaaataaat

SEQ ID NO: 152 - RNA, 21 nt, synthetic construct
  source 1..21: mol_type = other RNA
  modified_base 1: mod_base = OTHER; note = 2'-O-methylguanosine-3'-phosphorothioate
  modified_base 2: mod_base = OTHER; note = 2'-O-methylguanosine-3'-phosphorothioate
  modified_base 3: mod_base = OTHER; note = 2'-O-methyluridine-3'-phosphate
  modified_base 4: mod_base = OTHER; note = 2'-O-methylcytidine-3'-phosphate
  modified_base 5: mod_base = OTHER; note = 2'-O-methyladenosine-3'-phosphate
  modified_base 6: mod_base = OTHER; note = 2'-O-methylguanosine-3'-phosphate
  modified_base 7: mod_base = OTHER; note = 2'-O-methyladenosine-3'-phosphate
  modified_base 8: mod_base = OTHER; note = 2'-O-methyluridine-3'-phosphate
  modified_base 9: mod_base = OTHER; note = 2'-deoxy-2'-fluorocytidine-3'-phosphate
  modified_base 10: mod_base = OTHER; note = 2'-deoxy-2'-fluorouridine-3'-phosphate
  modified_base 11: mod_base = OTHER; note = 2'-deoxy-2'-fluorouridine-3'-phosphate
  modified_base 12: mod_base = OTHER; note = 2'-O-methylcytidine-3'-phosphate
  modified_base 13: mod_base = OTHER; note = 2'-O-methyladenosine-3'-phosphate
  modified_base 14: mod_base = OTHER; note = 2'-O-methyladenosine-3'-phosphate
  modified_base 15: mod_base = OTHER; note = 2'-O-methyladenosine-3'-phosphate
  modified_base 16: mod_base = OTHER; note = 2'-O-methyladenosine-3'-phosphate
  modified_base 17: mod_base = OTHER; note = 2'-O-methyluridine-3'-phosphate
  modified_base 18: mod_base = OTHER; note = 2'-O-methyladenosine-3'-phosphate
  modified_base 19: mod_base = OTHER; note = 2'-O-methyladenosine-3'-phosphate
  modified_base 20: mod_base = OTHER; note = 2'-O-methyladenosine-3'-phosphate
  modified_base 21: mod_base = OTHER; note = 2'-O-methyluridine-3'-phosphate ((2S,4R)-1-[29-[[2-(acetylamino)-2-deoxy-beta-D-galactopyra nosyl]oxy]-14,14-bis[[3-[[3-[[5-[[2-(acetylamino)-2-deoxy-b eta-D-galactopyranosyl]oxy]-1-oxopentyl]amino]propyl]amino] -3-oxopropoxy]methyl]-1,12,19,25-tetraoxo-16-oxa-13,20,24-t riazanonacos-1-yl]-4-hydroxy-2-pyrrolidinyl)methyl ester
ggtcagatcttcaaaataaat

SEQ ID NO: 153 - RNA, 23 nt, synthetic construct
  source 1..23: mol_type = other RNA
  modified_base 1: mod_base = OTHER; note = 2'-O-methyladenosine-3'-phosphorothioate
  modified_base 2: mod_base = OTHER; note = 2'-deoxy-2'-fluorouridine-3'-phosphorothioate
  modified_base 3: mod_base = OTHER; note = 2'-O-methyluridine-3'-phosphate
  modified_base 4: mod_base = OTHER; note = 2'-O-methyluridine-3'-phosphate
  modified_base 5: mod_base = OTHER; note = 2'-O-methyladenosine-3'-phosphate
  modified_base 6: mod_base = OTHER; note = 2'-deoxy-2'-fluorouridine-3'-phosphate
  modified_base 7: mod_base = OTHER; note = 2'-O-methyluridine-3'-phosphate
  modified_base 8: mod_base = OTHER; note = 2'-deoxy-2'-fluorouridine-3'-phosphate
  modified_base 9: mod_base = OTHER; note = 2'-deoxy-2'-fluorouridine-3'-phosphate
  modified_base 10: mod_base = OTHER; note = 2'-O-methylguanosine-3'-phosphate
  modified_base 11: mod_base = OTHER; note = 2'-O-methyladenosine-3'-phosphate
  modified_base 12: mod_base = OTHER; note = 2'-O-methyladenosine-3'-phosphate
  modified_base 13: mod_base = OTHER; note = 2'-O-methylguanosine-3'-phosphate
  modified_base 14: mod_base = OTHER; note = 2'-deoxy-2'-fluoroadenosine-3'-phosphate
  modified_base 15: mod_base = OTHER; note = 2'-O-methyluridine-3'-phosphate
  modified_base 16: mod_base = OTHER; note = 2'-deoxy-2'-fluorocytidine-3'-phosphate
  modified_base 17: mod_base = OTHER; note = 2'-O-methyluridine-3'-phosphate
  modified_base 18: mod_base = OTHER; note = 2'-O-methylguanosine-3'-phosphate
  modified_base 19: mod_base = OTHER; note = 2'-O-methyladenosine-3'-phosphate
  modified_base 20: mod_base = OTHER; note = 2'-O-methylcytidine-3'-phosphate
  modified_base 21: mod_base = OTHER; note = 2'-O-methylcytidine-3'-phosphorothioate
  modified_base 22: mod_base = OTHER; note = 2'-O-methyladenosine-3'-phosphorothioate
  modified_base 23: mod_base = OTHER; note = 2'-O-methyluridine
atttattttgaagatctgaccat

SEQ ID NO: 154 - RNA, 23 nt, synthetic construct
  source 1..23: mol_type = other RNA
  modified_base 2: mod_base = OTHER; note = 5'-methyluridine-3'-phosphate
  modified_base 5: mod_base = OTHER; note = 5'-methyluridine-3'-phosphate
  modified_base 10: mod_base = OTHER; note = 5'-methyluridine-3'-phosphate
  modified_base 12: mod_base = OTHER; note = 5'-methyluridine-3'-phosphate
  modified_base 13: mod_base = OTHER; note = 5'-methyluridine-3'-phosphate
  modified_base 19: mod_base = OTHER; note = 5'-methyluridine-3'-phosphate
  modified_base 23: mod_base = OTHER; note = 5'-methyluridine
atggtcagatcttcaaaataaat

SEQ ID NO: 155 - RNA, 21 nt, synthetic construct
  source 1..21: mol_type = other RNA
  modified_base 1: mod_base = OTHER; note = 2'-O-methylguanosine-3'-phosphorothioate
  modified_base 2: mod_base = OTHER; note = 2'-O-methylguanosine-3'-phosphorothioate
  modified_base 3: mod_base = OTHER; note = 2'-O-methyluridine-3'-phosphate
  modified_base 4: mod_base = OTHER; note = 2'-O-methylcytidine-3'-phosphate
  modified_base 5: mod_base = OTHER; note = 2'-O-methyladenosine-3'-phosphate
  modified_base 6: mod_base = OTHER; note = 2'-O-methylguanosine-3'-phosphate
  modified_base 7: mod_base = OTHER; note = 2'-deoxy-2'-fluoroadenosine-3'-phosphate
  modified_base 8: mod_base = OTHER; note = 2'-O-methyluridine-3'-phosphate
  modified_base 9: mod_base = OTHER; note = 2'-deoxy-2'-fluorocytidine-3'-phosphate
  modified_base 10: mod_base = OTHER; note = 2'-deoxy-2'-fluorouridine-3'-phosphate
  modified_base 11: mod_base = OTHER; note = 2'-deoxy-2'-fluorouridine-3'-phosphate
  modified_base 12: mod_base = OTHER; note = 2'-O-methylcytidine-3'-phosphate
  modified_base 13: mod_base = OTHER; note = 2'-O-methyladenosine-3'-phosphate
  modified_base 14: mod_base = OTHER; note = 2'-O-methyladenosine-3'-phosphate
  modified_base 15: mod_base = OTHER; note = 2'-O-methyladenosine-3'-phosphate
  modified_base 16: mod_base = OTHER; note = 2'-O-methyladenosine-3'-phosphate
  modified_base 17: mod_base = OTHER; note = 2'-O-methyluridine-3'-phosphate
  modified_base 18: mod_base = OTHER; note = 2'-O-methyladenosine-3'-phosphate
  modified_base 19: mod_base = OTHER; note = 2'-O-methyladenosine-3'-phosphate
  modified_base 20: mod_base = OTHER; note = 2'-O-methyladenosine-3'-phosphate
  modified_base 21: mod_base = OTHER; note = 2'-O-methyluridine-3'-phosphate ((2S,4R)-1-[29-[[2-(acetylamino)-2-deoxy-beta-D-galactopyra nosyl]oxy]-14,14-bis[[3-[[3-[[5-[[2-(acetylamino)-2-deoxy-b eta-D-galactopyranosyl]oxy]-1-oxopentyl]amino]propyl]amino] -3-oxopropoxy]methyl]-1,12,19,25-tetraoxo-16-oxa-13,20,24-t riazanonacos-1-yl]-4-hydroxy-2-pyrrolidinyl)methyl ester
ggtcagatcttcaaaataaat

SEQ ID NO: 156 - RNA, 23 nt, synthetic construct
  source 1..23: mol_type = other RNA
  modified_base 1: mod_base = OTHER; note = 2'-O-methyladenosine-3'-phosphorothioate
  modified_base 2: mod_base = OTHER; note = 2'-deoxy-2'-fluorouridine-3'-phosphorothioate
  modified_base 3: mod_base = OTHER; note = 2'-O-methyluridine-3'-phosphate
  modified_base 4: mod_base = OTHER; note = 2'-O-methyluridine-3'-phosphate
  modified_base 5: mod_base = OTHER; note = 2'-O-methyladenosine-3'-phosphate
  modified_base 6: mod_base = OTHER; note = 2'-deoxy-2'-fluorouridine-3'-phosphate
  modified_base 7: mod_base = OTHER; note = 2'-O-methyluridine-3'-phosphate
  modified_base 8: mod_base = OTHER; note = 2'-O-methyluridine-3'-phosphate
  modified_base 9: mod_base = OTHER; note = 2'-O-methyluridine-3'-phosphate
  modified_base 10: mod_base = OTHER; note = 2'-O-methylguanosine-3'-phosphate
  modified_base 11: mod_base = OTHER; note = 2'-O-methyladenosine-3'-phosphate
  modified_base 12: mod_base = OTHER; note = 2'-O-methyladenosine-3'-phosphate
  modified_base 13: mod_base = OTHER; note = 2'-O-methylguanosine-3'-phosphate
  modified_base 14: mod_base = OTHER; note = 2'-deoxy-2'-fluoroadenosine-3'-phosphate
  modified_base 15: mod_base = OTHER; note = 2'-O-methyluridine-3'-phosphate
  modified_base 16: mod_base = OTHER; note = 2'-deoxy-2'-fluorocytidine-3'-phosphate
  modified_base 17: mod_base = OTHER; note = 2'-O-methyluridine-3'-phosphate
  modified_base 18: mod_base = OTHER; note = 2'-O-methylguanosine-3'-phosphate
  modified_base 19: mod_base = OTHER; note = 2'-O-methyladenosine-3'-phosphate
  modified_base 20: mod_base = OTHER; note = 2'-O-methylcytidine-3'-phosphate
  modified_base 21: mod_base = OTHER; note = 2'-O-methylcytidine-3'-phosphorothioate
  modified_base 22: mod_base = OTHER; note = 2'-O-methyladenosine-3'-phosphorothioate
  modified_base 23: mod_base = OTHER; note = 2'-O-methyluridine
atttattttgaagatctgaccat

SEQ ID NO: 157 - RNA, 23 nt, synthetic construct
  source 1..23: mol_type = other RNA
  modified_base 2: mod_base = OTHER; note = 5'-methyluridine-3'-phosphate
  modified_base 5: mod_base = OTHER; note = 5'-methyluridine-3'-phosphate
  modified_base 10: mod_base = OTHER; note = 5'-methyluridine-3'-phosphate
  modified_base 12: mod_base = OTHER; note = 5'-methyluridine-3'-phosphate
  modified_base 13: mod_base = OTHER; note = 5'-methyluridine-3'-phosphate
  modified_base 19: mod_base = OTHER; note = 5'-methyluridine-3'-phosphate
  modified_base 23: mod_base = OTHER; note = 5'-methyluridine
atggtcagatcttcaaaataaat

SEQ ID NO: 158 - RNA, 21 nt, synthetic construct
  source 1..21: mol_type = other RNA
  modified_base 1: mod_base = OTHER; note = 2'-O-methylguanosine-3'-phosphorothioate
  modified_base 2: mod_base = OTHER; note = 2'-O-methylguanosine-3'-phosphorothioate
  modified_base 3: mod_base = OTHER; note = 2'-O-methyluridine-3'-phosphate
  modified_base 4: mod_base = OTHER; note = 2'-O-methylcytidine-3'-phosphate
  modified_base 5: mod_base = OTHER; note = 2'-O-methyladenosine-3'-phosphate
  modified_base 6: mod_base = OTHER; note = 2'-O-methylguanosine-3'-phosphate
  modified_base 7: mod_base = OTHER; note = 2'-deoxy-2'-fluoroadenosine-3'-phosphate
  modified_base 8: mod_base = OTHER; note = 2'-O-methyluridine-3'-phosphate
  modified_base 9: mod_base = OTHER; note = 2'-deoxy-2'-fluorocytidine-3'-phosphate
  modified_base 10: mod_base = OTHER; note = 2'-deoxy-2'-fluorouridine-3'-phosphate
  modified_base 11: mod_base = OTHER; note = 2'-deoxy-2'-fluorouridine-3'-phosphate
  modified_base 12: mod_base = OTHER; note = 2'-O-methylcytidine-3'-phosphate
  modified_base 13: mod_base = OTHER; note = 2'-O-methyladenosine-3'-phosphate
  modified_base 14: mod_base = OTHER; note = 2'-O-methyladenosine-3'-phosphate
  modified_base 15: mod_base = OTHER; note = 2'-O-methyladenosine-3'-phosphate
  modified_base 16: mod_base = OTHER; note = 2'-O-methyladenosine-3'-phosphate
  modified_base 17: mod_base = OTHER; note = 2'-O-methyluridine-3'-phosphate
  modified_base 18: mod_base = OTHER; note = 2'-O-methyladenosine-3'-phosphate
  modified_base 19: mod_base = OTHER; note = 2'-O-methyladenosine-3'-phosphate
  modified_base 20: mod_base = OTHER; note = 2'-O-methyladenosine-3'-phosphate
  modified_base 21: mod_base = OTHER; note = 2'-O-methyluridine-3'-phosphate ((2S,4R)-1-[29-[[2-(acetylamino)-2-deoxy-beta-D-galactopyra nosyl]oxy]-14,14-bis[[3-[[3-[[5-[[2-(acetylamino)-2-deoxy-b eta-D-galactopyranosyl]oxy]-1-oxopentyl]amino]propyl]amino] -3-oxopropoxy]methyl]-1,12,19,25-tetraoxo-16-oxa-13,20,24-t riazanonacos-1-yl]-4-hydroxy-2-pyrrolidinyl)methyl ester
ggtcagatcttcaaaataaat

SEQ ID NO: 159 - RNA, 23 nt, synthetic construct
  source 1..23: mol_type = other RNA
  modified_base 1: mod_base = OTHER; note = 2'-O-methyladenosine-3'-phosphorothioate
  modified_base 2: mod_base = OTHER; note = 2'-deoxy-2'-fluorouridine-3'-phosphorothioate
  modified_base 3: mod_base = OTHER; note = 2'-O-methyluridine-3'-phosphate
  modified_base 4: mod_base = OTHER; note = 2'-O-methyluridine-3'-phosphate
  modified_base 5: mod_base = OTHER; note = 2'-O-methyladenosine-3'-phosphate
  modified_base 6: mod_base = OTHER; note = 2'-deoxy-2'-fluorouridine-3'-phosphate
  modified_base 7: mod_base = OTHER; note = 2'-O-methyluridine-3'-phosphate
  modified_base 8: mod_base = OTHER; note = 2'-O-methyluridine-3'-phosphate
  modified_base 9: mod_base = OTHER; note = 2'-O-methyluridine-3'-phosphate
  modified_base 10: mod_base = OTHER; note = 2'-O-methylguanosine-3'-phosphate
  modified_base 11: mod_base = OTHER; note = 2'-O-methyladenosine-3'-phosphate
  modified_base 12: mod_base = OTHER; note = 2'-deoxy-2'-fluoroadenosine-3'-phosphate
  modified_base 13: mod_base = OTHER; note = 2'-O-methylguanosine-3'-phosphate
  modified_base 14: mod_base = OTHER; note = 2'-deoxy-2'-fluoroadenosine-3'-phosphate
  modified_base 15: mod_base = OTHER; note = 2'-O-methyluridine-3'-phosphate
  modified_base 16: mod_base = OTHER; note = 2'-deoxy-2'-fluorocytidine-3'-phosphate
  modified_base 17: mod_base = OTHER; note = 2'-O-methyluridine-3'-phosphate
  modified_base 18: mod_base = OTHER; note = 2'-O-methylguanosine-3'-phosphate
  modified_base 19: mod_base = OTHER; note = 2'-O-methyladenosine-3'-phosphate
  modified_base 20: mod_base = OTHER; note = 2'-O-methylcytidine-3'-phosphate
  modified_base 21: mod_base = OTHER; note = 2'-O-methylcytidine-3'-phosphorothioate
  modified_base 22: mod_base = OTHER; note = 2'-O-methyladenosine-3'-phosphorothioate
  modified_base 23: mod_base = OTHER; note = 2'-O-methyluridine
atttattttgaagatctgaccat

SEQ ID NO: 160 - RNA, 23 nt, synthetic construct
  source 1..23: mol_type = other RNA
  modified_base 2: mod_base = OTHER; note = 5'-methyluridine-3'-phosphate
  modified_base 5: mod_base = OTHER; note = 5'-methyluridine-3'-phosphate
  modified_base 10: mod_base = OTHER; note = 5'-methyluridine-3'-phosphate
  modified_base 12: mod_base = OTHER; note = 5'-methyluridine-3'-phosphate
  modified_base 13: mod_base = OTHER; note = 5'-methyluridine-3'-phosphate
  modified_base 19: mod_base = OTHER; note = 5'-methyluridine-3'-phosphate
  modified_base 23: mod_base = OTHER; note = 5'-methyluridine
atggtcagatcttcaaaataaat

SEQ ID NO: 161 - RNA, 21 nt, synthetic construct
  source 1..21: mol_type = other RNA
  modified_base 1: mod_base = OTHER; note = 2'-O-methylguanosine-3'-phosphorothioate
  modified_base 2: mod_base = OTHER; note = 2'-O-methylguanosine-3'-phosphorothioate
  modified_base 3: mod_base = OTHER; note = 2'-O-methyluridine-3'-phosphate
  modified_base 4: mod_base = OTHER; note = 2'-O-methylcytidine-3'-phosphate
  modified_base 5: mod_base = OTHER; note = 2'-O-methyladenosine-3'-phosphate
  modified_base 6: mod_base = OTHER; note = 2'-O-methylguanosine-3'-phosphate
  modified_base 7: mod_base = OTHER; note = 2'-O-methyladenosine-3'-phosphate
  modified_base 8: mod_base = OTHER; note = 2'-O-methyluridine-3'-phosphate
  modified_base 9: mod_base = OTHER; note = 2'-deoxy-2'-fluorocytidine-3'-phosphate
  modified_base 10: mod_base = OTHER; note = 2'-deoxy-2'-fluorouridine-3'-phosphate
  modified_base 11: mod_base = OTHER; note = 2'-deoxy-2'-fluorouridine-3'-phosphate
  modified_base 12: mod_base = OTHER; note = 2'-O-methylcytidine-3'-phosphate
  modified_base 13: mod_base = OTHER; note = 2'-O-methyladenosine-3'-phosphate
  modified_base 14: mod_base = OTHER; note = 2'-O-methyladenosine-3'-phosphate
  modified_base 15: mod_base = OTHER; note = 2'-O-methyladenosine-3'-phosphate
  modified_base 16: mod_base = OTHER; note = 2'-O-methyladenosine-3'-phosphate
  modified_base 17: mod_base = OTHER; note = 2'-O-methyluridine-3'-phosphate
  modified_base 18: mod_base = OTHER; note = 2'-O-methyladenosine-3'-phosphate
  modified_base 19: mod_base = OTHER; note = 2'-O-methyladenosine-3'-phosphate
  modified_base 20: mod_base = OTHER; note = 2'-O-methyladenosine-3'-phosphate
  modified_base 21: mod_base = OTHER; note = 2'-O-methyluridine-3'-phosphate ((2S,4R)-1-[29-[[2-(acetylamino)-2-deoxy-beta-D-galactopyra nosyl]oxy]-14,14-bis[[3-[[3-[[5-[[2-(acetylamino)-2-deoxy-b eta-D-galactopyranosyl]oxy]-1-oxopentyl]amino]propyl]amino] -3-oxopropoxy]methyl]-1,12,19,25-tetraoxo-16-oxa-13,20,24-t riazanonacos-1-yl]-4-hydroxy-2-pyrrolidinyl)methyl ester
ggtcagatcttcaaaataaat

SEQ ID NO: 162 - RNA, 23 nt, synthetic construct
  source 1..23: mol_type = other RNA
  modified_base 1: mod_base = OTHER; note = 2'-O-methyladenosine-3'-phosphorothioate
  modified_base 2: mod_base = OTHER; note = 2'-deoxy-2'-fluorouridine-3'-phosphorothioate
  modified_base 3: mod_base = OTHER; note = 2'-O-methyluridine-3'-phosphate
  modified_base 4: mod_base = OTHER; note = 2'-O-methyluridine-3'-phosphate
  modified_base 5: mod_base = OTHER; note = 2'-O-methyladenosine-3'-phosphate
  modified_base 6: mod_base = OTHER; note = 2'-deoxy-2'-fluorouridine-3'-phosphate
  modified_base 7: mod_base = OTHER; note = 2'-O-methyluridine-3'-phosphate
  modified_base 8: mod_base = OTHER; note = 2'-deoxy-2'-fluorouridine-3'-phosphate
  modified_base 9: mod_base = OTHER; note = 2'-deoxy-2'-fluorouridine-3'-phosphate
  modified_base 10: mod_base = OTHER; note = 2'-O-methylguanosine-3'-phosphate
  modified_base 11: mod_base = OTHER; note = 2'-O-methyladenosine-3'-phosphate
  modified_base 12: mod_base = OTHER; note = 2'-deoxy-2'-fluoroadenosine-3'-phosphate
  modified_base 13: mod_base = OTHER; note = 2'-O-methylguanosine-3'-phosphate
  modified_base 14: mod_base = OTHER; note = 2'-deoxy-2'-fluoroadenosine-3'-phosphate
  modified_base 15: mod_base = OTHER; note = 2'-O-methyluridine-3'-phosphate
  modified_base 16: mod_base = OTHER; note = 2'-deoxy-2'-fluorocytidine-3'-phosphate
  modified_base 17: mod_base = OTHER; note = 2'-O-methyluridine-3'-phosphate
  modified_base 18: mod_base = OTHER; note = 2'-O-methylguanosine-3'-phosphate
  modified_base 19: mod_base = OTHER; note = 2'-O-methyladenosine-3'-phosphate
  modified_base 20: mod_base = OTHER; note = 2'-O-methylcytidine-3'-phosphate
  modified_base 21: mod_base = OTHER; note = 2'-O-methylcytidine-3'-phosphorothioate
  modified_base 22: mod_base = OTHER; note = 2'-O-methyladenosine-3'-phosphorothioate
  modified_base 23: mod_base = OTHER; note = 2'-O-methyluridine
atttattttgaagatctgaccat

SEQ ID NO: 163 - RNA, 23 nt, synthetic construct
  source 1..23: mol_type = other RNA
  modified_base 2: mod_base = OTHER; note = 5'-methyluridine-3'-phosphate
  modified_base 5: mod_base = OTHER; note = 5'-methyluridine-3'-phosphate
  modified_base 10: mod_base = OTHER; note = 5'-methyluridine-3'-phosphate
  modified_base 12: mod_base = OTHER; note = 5'-methyluridine-3'-phosphate
  modified_base 13: mod_base = OTHER; note = 5'-methyluridine-3'-phosphate
  modified_base 19: mod_base = OTHER; note = 5'-methyluridine-3'-phosphate
  modified_base 23: mod_base = OTHER; note = 5'-methyluridine
atggtcagatcttcaaaataaat

SEQ ID NO: 164 - RNA, 21 nt, synthetic construct
  source 1..21: mol_type = other RNA
  modified_base 1: mod_base = OTHER; note = 2'-O-methylguanosine-3'-phosphorothioate
  modified_base 2: mod_base = OTHER; note = 2'-O-methylguanosine-3'-phosphorothioate
  modified_base 3: mod_base = OTHER; note = 2'-O-methyluridine-3'-phosphate
  modified_base 4: mod_base = OTHER; note = 2'-O-methylcytidine-3'-phosphate
  modified_base 5: mod_base = OTHER; note = 2'-O-methyladenosine-3'-phosphate
  modified_base 6: mod_base = OTHER; note = 2'-O-methylguanosine-3'-phosphate
  modified_base 7: mod_base = OTHER; note = 2'-O-methyladenosine-3'-phosphate
  modified_base 8: mod_base = OTHER; note = 2'-O-methyluridine-3'-phosphate
  modified_base 9: mod_base = OTHER; note = 2'-deoxy-2'-fluorocytidine-3'-phosphate
  modified_base 10: mod_base = OTHER; note = 2'-deoxy-2'-fluorouridine-3'-phosphate
  modified_base 11: mod_base = OTHER; note = 2'-deoxy-2'-fluorouridine-3'-phosphate
  modified_base 12: mod_base = OTHER; note = 2'-O-methylcytidine-3'-phosphate
  modified_base 13: mod_base = OTHER; note = 2'-O-methyladenosine-3'-phosphate
  modified_base 14: mod_base = OTHER; note = 2'-O-methyladenosine-3'-phosphate
  modified_base 15: mod_base = OTHER; note = 2'-O-methyladenosine-3'-phosphate
  modified_base 16: mod_base = OTHER; note = 2'-O-methyladenosine-3'-phosphate
  modified_base 17: mod_base = OTHER; note = 2'-O-methyluridine-3'-phosphate
  modified_base 18: mod_base = OTHER; note = 2'-O-methyladenosine-3'-phosphate
  modified_base 19: mod_base = OTHER; note = 2'-O-methyladenosine-3'-phosphate
  modified_base 20: mod_base = OTHER; note = 2'-O-methyladenosine-3'-phosphate
  modified_base 21: mod_base = OTHER; note = 2'-O-methyluridine-3'-phosphate ((2S,4R)-1-[29-[[2-(acetylamino)-2-deoxy-beta-D-galactopyra nosyl]oxy]-14,14-bis[[3-[[3-[[5-[[2-(acetylamino)-2-deoxy-b eta-D-galactopyranosyl]oxy]-1-oxopentyl]amino]propyl]amino] -3-oxopropoxy]methyl]-1,12,19,25-tetraoxo-16-oxa-13,20,24-t riazanonacos-1-yl]-4-hydroxy-2-pyrrolidinyl)methyl ester
ggtcagatcttcaaaataaat

SEQ ID NO: 165 - RNA, 23 nt, synthetic construct
  source 1..23: mol_type = other RNA
  modified_base 1: mod_base = OTHER; note = 2'-O-methyladenosine-3'-phosphorothioate
  modified_base 2: mod_base = OTHER; note = 2'-deoxy-2'-fluorouridine-3'-phosphorothioate
  modified_base 3: mod_base = OTHER; note = 2'-O-methyluridine-3'-phosphate
  modified_base 4: mod_base = OTHER; note = 2'-O-methyluridine-3'-phosphate
  modified_base 5: mod_base = OTHER; note = 2'-O-methyladenosine-3'-phosphate
  modified_base 6: mod_base = OTHER; note = 2'-deoxy-2'-fluorouridine-3'-phosphate
  modified_base 7: mod_base = OTHER; note = 2'-O-methyluridine-3'-phosphate
  modified_base 8: mod_base = OTHER; note = 2'-O-methyluridine-3'-phosphate
  modified_base 9: mod_base = OTHER; note = 2'-O-methyluridine-3'-phosphate
  modified_base 10: mod_base = OTHER; note = 2'-O-methylguanosine-3'-phosphate
  modified_base 11: mod_base = OTHER; note = 2'-O-methyladenosine-3'-phosphate
  modified_base 12: mod_base = OTHER; note = 2'-deoxy-2'-fluoroadenosine-3'-phosphate
  modified_base 13: mod_base = OTHER; note = 2'-O-methylguanosine-3'-phosphate
  modified_base 14: mod_base = OTHER; note = 2'-deoxy-2'-fluoroadenosine-3'-phosphate
  modified_base 15: mod_base = OTHER; note = 2'-O-methyluridine-3'-phosphate
  modified_base 16: mod_base = OTHER; note = 2'-deoxy-2'-fluorocytidine-3'-phosphate
  modified_base 17: mod_base = OTHER; note = 2'-O-methyluridine-3'-phosphate
  modified_base 18: mod_base = OTHER; note = 2'-O-methylguanosine-3'-phosphate
  modified_base 19: mod_base = OTHER; note = 2'-O-methyladenosine-3'-phosphate
  modified_base 20: mod_base = OTHER; note = 2'-O-methylcytidine-3'-phosphate
  modified_base 21: mod_base = OTHER; note = 2'-O-methylcytidine-3'-phosphorothioate
  modified_base 22: mod_base = OTHER; note = 2'-O-methyladenosine-3'-phosphorothioate
  modified_base 23: mod_base = OTHER; note = 2'-O-methyluridine
atttattttgaagatctgaccat

SEQ ID NO: 166 - RNA, 23 nt, synthetic construct
  source 1..23: mol_type = other RNA
  modified_base 2: mod_base = OTHER; note = 5'-methyluridine-3'-phosphate
  modified_base 5: mod_base = OTHER; note = 5'-methyluridine-3'-phosphate
  modified_base 10: mod_base = OTHER; note = 5'-methyluridine-3'-phosphate
  modified_base 12: mod_base = OTHER; note = 5'-methyluridine-3'-phosphate
  modified_base 13: mod_base = OTHER; note = 5'-methyluridine-3'-phosphate
  modified_base 19: mod_base = OTHER; note = 5'-methyluridine-3'-phosphate
  modified_base 23: mod_base = OTHER; note = 5'-methyluridine
atggtcagatcttcaaaataaat

SEQ ID NO: 167 - RNA, 21 nt, synthetic construct
  source 1..21: mol_type = other RNA
  modified_base 1: mod_base = OTHER; note = 2'-O-methylguanosine-3'-phosphorothioate
  modified_base 2: mod_base = OTHER; note = 2'-O-methylguanosine-3'-phosphorothioate
  modified_base 3: mod_base = OTHER; note = 2'-O-methyluridine-3'-phosphate
  modified_base 4: mod_base = OTHER; note = 2'-O-methylcytidine-3'-phosphate
  modified_base 5: mod_base = OTHER; note = 2'-O-methyladenosine-3'-phosphate
  modified_base 6: mod_base = OTHER; note = 2'-O-methylguanosine-3'-phosphate
  modified_base 7: mod_base = OTHER; note = 2'-O-methyladenosine-3'-phosphate
  modified_base 8: mod_base = OTHER; note = 2'-O-methyluridine-3'-phosphate
  modified_base 9: mod_base = OTHER; note = 2'-O-methylcytidine-3'-phosphate
  modified_base 10: mod_base = OTHER; note = 2'-deoxy-2'-fluorouridine-3'-phosphate
  modified_base 11: mod_base = OTHER; note = 2'-deoxy-2'-fluorouridine-3'-phosphate
  modified_base 12: mod_base = OTHER; note = 2'-O-methylcytidine-3'-phosphate
  modified_base 13: mod_base = OTHER; note = 2'-O-methyladenosine-3'-phosphate
  modified_base 14: mod_base = OTHER; note = 2'-O-methyladenosine-3'-phosphate
  modified_base 15: mod_base = OTHER; note = 2'-O-methyladenosine-3'-phosphate
  modified_base 16: mod_base = OTHER; note = 2'-O-methyladenosine-3'-phosphate
  modified_base 17: mod_base = OTHER; note = 2'-O-methyluridine-3'-phosphate
  modified_base 18: mod_base = OTHER; note = 2'-O-methyladenosine-3'-phosphate
  modified_base 19: mod_base = OTHER; note = 2'-O-methyladenosine-3'-phosphate
  modified_base 20: mod_base = OTHER; note = 2'-O-methyladenosine-3'-phosphate
  modified_base 21: mod_base = OTHER; note = 2'-O-methyluridine-3'-phosphate ((2S,4R)-1-[29-[[2-(acetylamino)-2-deoxy-beta-D-galactopyra nosyl]oxy]-14,14-bis[[3-[[3-[[5-[[2-(acetylamino)-2-deoxy-b eta-D-galactopyranosyl]oxy]-1-oxopentyl]amino]propyl]amino] -3-oxopropoxy]methyl]-1,12,19,25-tetraoxo-16-oxa-13,20,24-t riazanonacos-1-yl]-4-hydroxy-2-pyrrolidinyl)methyl ester
ggtcagatcttcaaaataaat

SEQ ID NO: 168 - RNA, 23 nt, synthetic construct
  source 1..23: mol_type = other RNA
  modified_base 1: mod_base = OTHER; note = 2'-O-methyladenosine-3'-phosphorothioate
  modified_base 2: mod_base = OTHER; note = 2'-deoxy-2'-fluorouridine-3'-phosphorothioate
  modified_base 3: mod_base = OTHER; note = 2'-O-methyluridine-3'-phosphate
  modified_base 4: mod_base = OTHER; note = 2'-O-methyluridine-3'-phosphate
  modified_base 5: mod_base = OTHER; note = 2'-O-methyladenosine-3'-phosphate
  modified_base 6: mod_base = OTHER; note = 2'-deoxy-2'-fluorouridine-3'-phosphate
  modified_base 7: mod_base = OTHER; note = 2'-O-methyluridine-3'-phosphate
  modified_base 8: mod_base = OTHER; note = 2'-deoxy-2'-fluorouridine-3'-phosphate
  modified_base 9: mod_base = OTHER; note = 2'-deoxy-2'-fluorouridine-3'-phosphate
  modified_base 10: mod_base = OTHER; note = 2'-O-methylguanosine-3'-phosphate
  modified_base 11: mod_base = OTHER; note = 2'-O-methyladenosine-3'-phosphate
  modified_base 12: mod_base = OTHER; note = 2'-deoxy-2'-fluoroadenosine-3'-phosphate
  modified_base 13: mod_base = OTHER; note = 2'-O-methylguanosine-3'-phosphate
  modified_base 14: mod_base = OTHER; note = 2'-deoxy-2'-fluoroadenosine-3'-phosphate
  modified_base 15: mod_base = OTHER; note = 2'-O-methyluridine-3'-phosphate
  modified_base 16: mod_base = OTHER; note = 2'-deoxy-2'-fluorocytidine-3'-phosphate
  modified_base 17: mod_base = OTHER; note = 2'-O-methyluridine-3'-phosphate
  modified_base 18: mod_base = OTHER; note = 2'-O-methylguanosine-3'-phosphate
  modified_base 19: mod_base = OTHER; note = 2'-O-methyladenosine-3'-phosphate
  modified_base 20: mod_base = OTHER; note = 2'-O-methylcytidine-3'-phosphate
  modified_base 21: mod_base = OTHER; note = 2'-O-methylcytidine-3'-phosphorothioate
  modified_base 22: mod_base = OTHER; note = 2'-O-methyladenosine-3'-phosphorothioate
  modified_base 23: mod_base = OTHER; note = 2'-O-methyluridine
atttattttgaagatctgaccat

SEQ ID NO: 169 - RNA, 23 nt, synthetic construct
  source 1..23: mol_type = other RNA
  modified_base 2: mod_base = OTHER; note = 5'-methyluridine-3'-phosphate
  modified_base 5: mod_base = OTHER; note = 5'-methyluridine-3'-phosphate
  modified_base 10: mod_base = OTHER; note = 5'-methyluridine-3'-phosphate
  modified_base 12: mod_base = OTHER; note = 5'-methyluridine-3'-phosphate
  modified_base 13: mod_base = OTHER; note = 5'-methyluridine-3'-phosphate
  modified_base 19: mod_base = OTHER; note = 5'-methyluridine-3'-phosphate
  modified_base 23: mod_base = OTHER; note = 5'-methyluridine
atggtcagatcttcaaaataaat

SEQ ID NO: 170 - RNA, 21 nt, synthetic construct
  source 1..21: mol_type = other RNA
  modified_base 1: mod_base = OTHER; note = 2'-O-methylguanosine-3'-phosphorothioate
  modified_base 2: mod_base = OTHER; note = 2'-O-methylguanosine-3'-phosphorothioate
  modified_base 3: mod_base = OTHER; note = 2'-O-methyluridine-3'-phosphate
  modified_base 4: mod_base = OTHER; note = 2'-O-methylcytidine-3'-phosphate
  modified_base 5: mod_base = OTHER; note = 2'-O-methyladenosine-3'-phosphate
  modified_base 6: mod_base = OTHER; note = 2'-O-methylguanosine-3'-phosphate
  modified_base 7: mod_base = OTHER; note = 2'-O-methyladenosine-3'-phosphate
  modified_base 8: mod_base = OTHER; note = 2'-O-methyluridine-3'-phosphate
  modified_base 9: mod_base = OTHER; note = 2'-O-methylcytidine-3'-phosphate
  modified_base 10: mod_base = OTHER; note = 2'-deoxy-2'-fluorouridine-3'-phosphate
  modified_base 11: mod_base = OTHER; note = 2'-deoxy-2'-fluorouridine-3'-phosphate
  modified_base 12: mod_base = OTHER; note = 2'-O-methylcytidine-3'-phosphate
  modified_base 13: mod_base = OTHER; note = 2'-O-methyladenosine-3'-phosphate
  modified_base 14: mod_base = OTHER; note = 2'-O-methyladenosine-3'-phosphate
  modified_base 15: mod_base = OTHER; note = 2'-O-methyladenosine-3'-phosphate
  modified_base 16: mod_base = OTHER; note = 2'-O-methyladenosine-3'-phosphate
  modified_base 17: mod_base = OTHER; note = 2'-O-methyluridine-3'-phosphate
  modified_base 18: mod_base = OTHER; note = 2'-O-methyladenosine-3'-phosphate
  modified_base 19: mod_base = OTHER; note = 2'-O-methyladenosine-3'-phosphate
  modified_base 20: mod_base = OTHER; note = 2'-O-methyladenosine-3'-phosphate
  modified_base 21: mod_base = OTHER; note = 2'-O-methyluridine-3'-phosphate ((2S,4R)-1-[29-[[2-(acetylamino)-2-deoxy-beta-D-galactopyra nosyl]oxy]-14,14-bis[[3-[[3-[[5-[[2-(acetylamino)-2-deoxy-b eta-D-galactopyranosyl]oxy]-1-oxopentyl]amino]propyl]amino] -3-oxopropoxy]methyl]-1,12,19,25-tetraoxo-16-oxa-13,20,24-t riazanonacos-1-yl]-4-hydroxy-2-pyrrolidinyl)methyl ester
ggtcagatcttcaaaataaat

SEQ ID NO: 171 - RNA, 23 nt, synthetic construct
  source 1..23: mol_type = other RNA
  modified_base 1: mod_base = OTHER; note = 2'-O-methyladenosine-3'-phosphorothioate
  modified_base 2: mod_base = OTHER; note = 2'-deoxy-2'-fluorouridine-3'-phosphorothioate
  modified_base 3: mod_base = OTHER; note = 2'-O-methyluridine-3'-phosphate
  modified_base 4: mod_base = OTHER; note = 2'-O-methyluridine-3'-phosphate
  modified_base 5: mod_base = OTHER; note = 2'-O-methyladenosine-3'-phosphate
  modified_base 6: mod_base = OTHER; note = 2'-deoxy-2'-fluorouridine-3'-phosphate
  modified_base 7: mod_base = OTHER; note = 2'-O-methyluridine-3'-phosphate
  modified_base 8: mod_base = OTHER; note = 2'-O-methyluridine-3'-phosphate
  modified_base 9: mod_base = OTHER; note = 2'-O-methyluridine-3'-phosphate
  modified_base 10: mod_base = OTHER; note = 2'-O-methylguanosine-3'-phosphate
  modified_base 11: mod_base = OTHER; note = 2'-O-methyladenosine-3'-phosphate
  modified_base 12: mod_base = OTHER; note = 2'-deoxy-2'-fluoroadenosine-3'-phosphate
  modified_base 13: mod_base = OTHER; note = 2'-O-methylguanosine-3'-phosphate
  modified_base 14: mod_base = OTHER; note = 2'-deoxy-2'-fluoroadenosine-3'-phosphate
  modified_base 15: mod_base = OTHER; note = 2'-O-methyluridine-3'-phosphate
  modified_base 16: mod_base = OTHER; note = 2'-deoxy-2'-fluorocytidine-3'-phosphate
  modified_base 17: mod_base = OTHER; note = 2'-O-methyluridine-3'-phosphate
  modified_base 18: mod_base = OTHER; note = 2'-O-methylguanosine-3'-phosphate
  modified_base 19: mod_base = OTHER; note = 2'-O-methyladenosine-3'-phosphate
  modified_base 20: mod_base = OTHER; note = 2'-O-methylcytidine-3'-phosphate
  modified_base 21: mod_base = OTHER; note = 2'-O-methylcytidine-3'-phosphorothioate
  modified_base 22: mod_base = OTHER; note = 2'-O-methyladenosine-3'-phosphorothioate
  modified_base 23: mod_base = OTHER; note = 2'-O-methyluridine
atttattttgaagatctgaccat

SEQ ID NO: 172 - RNA, 23 nt, synthetic construct
  source 1..23: mol_type = other RNA
  modified_base 2: mod_base = OTHER; note = 5'-methyluridine-3'-phosphate
  modified_base 5: mod_base = OTHER; note = 5'-methyluridine-3'-phosphate
  modified_base 10: mod_base = OTHER; note = 5'-methyluridine-3'-phosphate
  modified_base 12: mod_base = OTHER; note = 5'-methyluridine-3'-phosphate
  modified_base 13: mod_base = OTHER; note = 5'-methyluridine-3'-phosphate
  modified_base 19: mod_base = OTHER; note = 5'-methyluridine-3'-phosphate
  modified_base 23: mod_base = OTHER; note = 5'-methyluridine
atggtcagatcttcaaaataaat

SEQ ID NO: 173 - RNA, 21 nt, synthetic construct
  source 1..21: mol_type = other RNA
  modified_base 1: mod_base = OTHER; note = 2'-O-methylguanosine-3'-phosphorothioate
  modified_base 2: mod_base = OTHER; note = 2'-O-methylguanosine-3'-phosphorothioate
  modified_base 3: mod_base = OTHER; note = 2'-O-methyluridine-3'-phosphate
  modified_base 4: mod_base = OTHER; note = 2'-O-methylcytidine-3'-phosphate
  modified_base 5: mod_base = OTHER; note = 2'-O-methyladenosine-3'-phosphate
  modified_base 6: mod_base = OTHER; note = 2'-O-methylguanosine-3'-phosphate
  modified_base 7: mod_base = OTHER; note = 2'-deoxy-2'-fluoroadenosine-3'-phosphate
  modified_base 8: mod_base = OTHER; note = 2'-O-methyluridine-3'-phosphate
  modified_base 9: mod_base = OTHER; note = 2'-deoxy-2'-fluorocytidine-3'-phosphate
  modified_base 10: mod_base = OTHER; note = 2'-deoxy-2'-fluorouridine-3'-phosphate
  modified_base 11: mod_base = OTHER; note = 2'-deoxy-2'-fluorouridine-3'-phosphate
  modified_base 12: mod_base = OTHER; note = 2'-O-methylcytidine-3'-phosphate
  modified_base 13: mod_base = OTHER; note = 2'-O-methyladenosine-3'-phosphate
  modified_base 14: mod_base = OTHER; note = 2'-O-methyladenosine-3'-phosphate
  modified_base 15: mod_base = OTHER; note = 2'-O-methyladenosine-3'-phosphate
  modified_base 16: mod_base = OTHER; note = 2'-O-methyladenosine-3'-phosphate
  modified_base 17: mod_base = OTHER; note = 2'-O-methyluridine-3'-phosphate
  modified_base 18: mod_base = OTHER; note = 2'-O-methyladenosine-3'-phosphate
  modified_base 19: mod_base = OTHER; note = 2'-O-methyladenosine-3'-phosphate
  modified_base 20: mod_base = OTHER; note = 2'-O-methyladenosine-3'-phosphate
  modified_base 21: mod_base = OTHER; note = 2'-O-methyluridine-3'-phosphate ((2S,4R)-1-[29-[[2-(acetylamino)-2-deoxy-beta-D-galactopyra nosyl]oxy]-14,14-bis[[3-[[3-[[5-[[2-(acetylamino)-2-deoxy-b eta-D-galactopyranosyl]oxy]-1-oxopentyl]amino]propyl]amino] -3-oxopropoxy]methyl]-1,12,19,25-tetraoxo-16-oxa-13,20,24-t riazanonacos-1-yl]-4-hydroxy-2-pyrrolidinyl)methyl ester
ggtcagatcttcaaaataaat

SEQ ID NO: 174 - RNA, 23 nt, synthetic construct
  source 1..23: mol_type = other RNA
  modified_base 1: mod_base = OTHER; note = 2'-O-methyladenosine-3'-phosphorothioate
  modified_base 2: mod_base = OTHER; note = 2'-deoxy-2'-fluorouridine-3'-phosphorothioate
  modified_base 3: mod_base = OTHER; note = 2'-O-methyluridine-3'-phosphate
  modified_base 4: mod_base = OTHER; note = 2'-O-methyluridine-3'-phosphate
  modified_base 5: mod_base = OTHER; note = 2'-O-methyladenosine-3'-phosphate
  modified_base 6: mod_base = OTHER; note = 2'-deoxy-2'-fluorouridine-3'-phosphate
  modified_base 7: mod_base = OTHER; note = 2'-O-methyluridine-3'-phosphate
  modified_base 8: mod_base = OTHER; note = 2'-O-methyluridine-3'-phosphate
  modified_base 9: mod_base = OTHER; note = 2'-O-methyluridine-3'-phosphate
  modified_base 10: mod_base = OTHER; note = 2'-O-methylguanosine-3'-phosphate
  modified_base 11: mod_base = OTHER; note = 2'-O-methyladenosine-3'-phosphate
  modified_base 12: mod_base = OTHER; note = 2'-deoxy-2'-fluoroadenosine-3'-phosphate
  modified_base 13: mod_base = OTHER; note = 2'-O-methylguanosine-3'-phosphate
  modified_base 14: mod_base = OTHER; note = 2'-deoxy-2'-fluoroadenosine-3'-phosphate
  modified_base 15: mod_base = OTHER; note = 2'-O-methyluridine-3'-phosphate
  modified_base 16: mod_base = OTHER; note = 2'-deoxy-2'-fluorocytidine-3'-phosphate
  modified_base 17: mod_base = OTHER; note = 2'-O-methyluridine-3'-phosphate
  modified_base 18: mod_base = OTHER; note = 2'-O-methylguanosine-3'-phosphate
  modified_base 19: mod_base = OTHER; note = 2'-O-methyladenosine-3'-phosphate
  modified_base 20: mod_base = OTHER; note = 2'-O-methylcytidine-3'-phosphate
  modified_base 21: mod_base = OTHER; note = 2'-O-methylcytidine-3'-phosphorothioate
  modified_base 22: mod_base = OTHER; note = 2'-O-methylguanosine-3'-phosphorothioate
  modified_base 23: mod_base = OTHER; note = 2'-O-methyluridine
atttattttgaagatctgaccgt

SEQ ID NO: 175 - RNA, 23 nt, synthetic construct
  source 1..23: mol_type = other RNA
  modified_base 5: mod_base = OTHER; note = 5'-methyluridine-3'-phosphate
  modified_base 10: mod_base = OTHER; note = 5'-methyluridine-3'-phosphate
  modified_base 12: mod_base = OTHER; note = 5'-methyluridine-3'-phosphate
  modified_base 13: mod_base = OTHER; note = 5'-methyluridine-3'-phosphate
  modified_base 19: mod_base = OTHER; note = 5'-methyluridine-3'-phosphate
  modified_base 23: mod_base = OTHER; note = 5'-methyluridine
acggtcagatcttcaaaataaat

SEQ ID NO: 176 - RNA, 21 nt, synthetic construct
  source 1..21: mol_type = other RNA
  modified_base 1: mod_base = OTHER; note = 2'-O-methylguanosine-3'-phosphorothioate
  modified_base 2: mod_base = OTHER; note = 2'-O-methylguanosine-3'-phosphorothioate
  modified_base 3: mod_base = OTHER; note = 2'-O-methyluridine-3'-phosphate
  modified_base 4: mod_base = OTHER; note = 2'-O-methylcytidine-3'-phosphate
  modified_base 5: mod_base = OTHER; note = 2'-O-methyladenosine-3'-phosphate
  modified_base 6: mod_base = OTHER; note = 2'-O-methylguanosine-3'-phosphate
  modified_base 7: mod_base = OTHER; note = 2'-deoxy-2'-fluoroadenosine-3'-phosphate
  modified_base 8: mod_base = OTHER; note = 2'-O-methyluridine-3'-phosphate
  modified_base 9: mod_base = OTHER; note = 2'-deoxy-2'-fluorocytidine-3'-phosphate
  modified_base 10: mod_base = OTHER; note = 2'-deoxy-2'-fluorouridine-3'-phosphate
  modified_base 11: mod_base = OTHER; note = 2'-deoxy-2'-fluorouridine-3'-phosphate
  modified_base 12: mod_base = OTHER; note = 2'-O-methylcytidine-3'-phosphate
  modified_base 13: mod_base = OTHER; note = 2'-O-methyladenosine-3'-phosphate
  modified_base 14: mod_base = OTHER; note = 2'-O-methyladenosine-3'-phosphate
  modified_base 15: mod_base = OTHER; note = 2'-O-methyladenosine-3'-phosphate
  modified_base 16: mod_base = OTHER; note = 2'-O-methyladenosine-3'-phosphate
  modified_base 17: mod_base = OTHER; note = 2'-O-methyluridine-3'-phosphate
  modified_base 18: mod_base = OTHER; note = 2'-O-methyladenosine-3'-phosphate
  modified_base 19: mod_base = OTHER; note = 2'-O-methyladenosine-3'-phosphate
  modified_base 20: mod_base = OTHER; note = 2'-O-methyladenosine-3'-phosphate
  modified_base 21: mod_base = OTHER; note = 2'-O-methyluridine-3'-phosphate ((2S,4R)-1-[29-[[2-(acetylamino)-2-deoxy-beta-D-galactopyra nosyl]oxy]-14,14-bis[[3-[[3-[[5-[[2-(acetylamino)-2-deoxy-b eta-D-galactopyranosyl]oxy]-1-oxopentyl]amino]propyl]amino] -3-oxopropoxy]methyl]-1,12,19,25-tetraoxo-16-oxa-13,20,24-t riazanonacos-1-yl]-4-hydroxy-2-pyrrolidinyl)methyl ester
ggtcagatcttcaaaataaat

SEQ ID NO: 177 - RNA, 23 nt, synthetic construct
  source 1..23: mol_type = other RNA
  modified_base 1: mod_base = OTHER; note = 2'-O-methyladenosine-3'-phosphorothioate
  modified_base 2: mod_base = OTHER; note = 2'-deoxy-2'-fluorouridine-3'-phosphorothioate
  modified_base 3: mod_base = OTHER; note = 2'-O-methyluridine-3'-phosphate
  modified_base 4: mod_base = OTHER; note = 2'-O-methyluridine-3'-phosphate
  modified_base 5: mod_base = OTHER; note = 2'-O-methyladenosine-3'-phosphate
  modified_base 6: mod_base = OTHER; note = 2'-deoxy-2'-fluorouridine-3'-phosphate
  modified_base 7: mod_base = OTHER; note = 2'-O-methyluridine-3'-phosphate
  modified_base 8: mod_base = OTHER; note = 2'-O-methyluridine-3'-phosphate
  modified_base 9: mod_base = OTHER; note = 2'-O-methyluridine-3'-phosphate
  modified_base 10: mod_base = OTHER; note = 2'-O-methylguanosine-3'-phosphate
  modified_base 11: mod_base = OTHER; note = 2'-O-methyladenosine-3'-phosphate
  modified_base 12: mod_base = OTHER; note = 2'-deoxy-2'-fluoroadenosine-3'-phosphate
  modified_base 13: mod_base = OTHER; note = 2'-O-methylguanosine-3'-phosphate
  modified_base 14: mod_base = OTHER; note = 2'-deoxy-2'-fluoroadenosine-3'-phosphate
  modified_base 15: mod_base = OTHER; note = 2'-O-methyluridine-3'-phosphate
  modified_base 16: mod_base = OTHER; note = 2'-deoxy-2'-fluorocytidine-3'-phosphate
  modified_base 17: mod_base = OTHER; note = 2'-O-methyluridine-3'-phosphate
  modified_base 18: mod_base = OTHER; note = 2'-O-methylguanosine-3'-phosphate
  modified_base 19: mod_base = OTHER; note = 2'-O-methyladenosine-3'-phosphate
  modified_base 20: mod_base = OTHER; note = 2'-O-methylcytidine-3'-phosphate
  modified_base 21: mod_base = OTHER; note = 2'-O-methylcytidine-3'-phosphorothioate
  modified_base 22: mod_base = OTHER; note = 2'-O-methylcytidine-3'-phosphorothioate
  modified_base 23: mod_base = OTHER; note = 2'-O-methyluridine
atttattttgaagatctgaccct

SEQ ID NO: 178 - RNA, 23 nt, synthetic construct
  source 1..23: mol_type = other RNA
  modified_base 5: mod_base = OTHER; note = 5'-methyluridine-3'-phosphate
  modified_base 10: mod_base = OTHER; note = 5'-methyluridine-3'-phosphate
  modified_base 12: mod_base = OTHER; note = 5'-methyluridine-3'-phosphate
  modified_base 13: mod_base = OTHER; note = 5'-methyluridine-3'-phosphate
  modified_base 19: mod_base = OTHER; note = 5'-methyluridine-3'-phosphate
  modified_base 23: mod_base = OTHER; note = 5'-methyluridine
agggtcagatcttcaaaataaat

SEQ ID NO: 179 - RNA, 21 nt, synthetic construct
  source 1..21: mol_type = other RNA
  modified_base 1: mod_base = OTHER; note = 2'-O-methylguanosine-3'-phosphorothioate
  modified_base 2: mod_base = OTHER; note = 2'-O-methylguanosine-3'-phosphorothioate
  modified_base 3: mod_base = OTHER; note = 2'-O-methyluridine-3'-phosphate
  modified_base 4: mod_base = OTHER; note = 2'-O-methylcytidine-3'-phosphate
  modified_base 5: mod_base = OTHER; note = 2'-O-methyladenosine-3'-phosphate
  modified_base 6: mod_base = OTHER; note = 2'-O-methylguanosine-3'-phosphate
  modified_base 7: mod_base = OTHER; note = 2'-deoxy-2'-fluoroadenosine-3'-phosphate
  modified_base 8: mod_base = OTHER; note = 2'-O-methyluridine-3'-phosphate
  modified_base 9: mod_base = OTHER; note = 2'-deoxy-2'-fluorocytidine-3'-phosphate
  modified_base 10: mod_base = OTHER; note = 2'-deoxy-2'-fluorouridine-3'-phosphate
  modified_base 11: mod_base = OTHER; note = 2'-deoxy-2'-fluorouridine-3'-phosphate
  modified_base 12: mod_base = OTHER; note = 2'-O-methylcytidine-3'-phosphate
  modified_base 13: mod_base = OTHER; note = 2'-O-methyladenosine-3'-phosphate
  modified_base 14: mod_base = OTHER; note = 2'-O-methyladenosine-3'-phosphate
  modified_base 15: mod_base = OTHER; note = 2'-O-methyladenosine-3'-phosphate
  modified_base 16: mod_base = OTHER; note = 2'-O-methyladenosine-3'-phosphate
  modified_base 17: mod_base = OTHER; note = 2'-O-methyluridine-3'-phosphate
  modified_base 18: mod_base = OTHER; note = 2'-O-methyladenosine-3'-phosphate
  modified_base 19: mod_base = OTHER; note = 2'-O-methyladenosine-3'-phosphate
  modified_base 20: mod_base = OTHER; note = 2'-O-methyladenosine-3'-phosphate
  modified_base 21: mod_base = OTHER; note = 2'-O-methyluridine-3'-phosphate ((2S,4R)-1-[29-[[2-(acetylamino)-2-deoxy-beta-D-galactopyra nosyl]oxy]-14,14-bis[[3-[[3-[[5-[[2-(acetylamino)-2-deoxy-b eta-D-galactopyranosyl]oxy]-1-oxopentyl]amino]propyl]amino] -3-oxopropoxy]methyl]-1,12,19,25-tetraoxo-16-oxa-13,20,24-t riazanonacos-1-yl]-4-hydroxy-2-pyrrolidinyl)methyl ester
ggtcagatcttcaaaataaat

SEQ ID NO: 180 - RNA, 23 nt, synthetic construct
  source 1..23: mol_type = other RNA
  modified_base 1: mod_base = OTHER; note = 2'-O-methyladenosine-3'-phosphorothioate
  modified_base 2: mod_base = OTHER; note = 2'-deoxy-2'-fluorouridine-3'-phosphorothioate
  modified_base 3: mod_base = OTHER; note = 2'-O-methyluridine-3'-phosphate
  modified_base 4: mod_base = OTHER; note = 2'-O-methyluridine-3'-phosphate
  modified_base 5: mod_base = OTHER; note = 2'-O-methyladenosine-3'-phosphate
  modified_base 6: mod_base = OTHER; note = 2'-deoxy-2'-fluorouridine-3'-phosphate
  modified_base 7: mod_base = OTHER; note = 2'-O-methyluridine-3'-phosphate
  modified_base 8: mod_base = OTHER; note = 2'-O-methyluridine-3'-phosphate
  modified_base 9: mod_base = OTHER; note = 2'-O-methyluridine-3'-phosphate
  modified_base 10: mod_base = OTHER; note = 2'-O-methylguanosine-3'-phosphate
  modified_base 11: mod_base = OTHER; note = 2'-O-methyladenosine-3'-phosphate
  modified_base 12: mod_base = OTHER; note = 2'-deoxy-2'-fluoroadenosine-3'-phosphate
  modified_base 13: mod_base = OTHER; note = 2'-O-methylguanosine-3'-phosphate
  modified_base 14: mod_base = OTHER; note = 2'-deoxy-2'-fluoroadenosine-3'-phosphate
  modified_base 15: mod_base = OTHER; note = 2'-O-methyluridine-3'-phosphate
  modified_base 16: mod_base = OTHER; note = 2'-deoxy-2'-fluorocytidine-3'-phosphate
  modified_base 17: mod_base = OTHER; note = 2'-O-methyluridine-3'-phosphate
  modified_base 18: mod_base = OTHER; note = 2'-O-methylguanosine-3'-phosphate
  modified_base 19: mod_base = OTHER; note = 2'-O-methyladenosine-3'-phosphate
  modified_base 20: mod_base = OTHER; note = 2'-O-methylcytidine-3'-phosphate
  modified_base 21: mod_base = OTHER; note = 2'-O-methylcytidine-3'-phosphorothioate
  modified_base 22: mod_base = OTHER; note = 2'-O-methylguanosine-3'-phosphorothioate
  modified_base 23: mod_base = OTHER; note = 2'-O-methylguanosine
atttattttgaagatctgaccgg

SEQ ID NO: 181 - RNA, 23 nt, synthetic construct
  source 1..23: mol_type = other RNA
  modified_base 5: mod_base = OTHER; note = 5'-methyluridine-3'-phosphate
  modified_base 10: mod_base = OTHER; note = 5'-methyluridine-3'-phosphate
  modified_base 12: mod_base = OTHER; note = 5'-methyluridine-3'-phosphate
  modified_base 13: mod_base = OTHER; note = 5'-methyluridine-3'-phosphate
  modified_base 19: mod_base = OTHER; note = 5'-methyluridine-3'-phosphate
  modified_base 23: mod_base = OTHER; note = 5'-methyluridine
ccggtcagatcttcaaaataaat

SEQ ID NO: 182 - RNA, 19 nt, synthetic construct
  source 1..19: mol_type = other RNA
  modified_base 1: mod_base = OTHER; note = 2'-O-methyluridine-3'-phosphorothioate
  modified_base 2: mod_base = OTHER; note = 2'-O-methylcytidine-3'-phosphorothioate
  modified_base 3: mod_base = OTHER; note = 2'-O-methyladenosine-3'-phosphate
  modified_base 4: mod_base = OTHER; note = 2'-O-methylguanosine-3'-phosphate
  modified_base 5: mod_base = OTHER; note = 2'-deoxy-2'-fluoroadenosine-3'-phosphate
  modified_base 6: mod_base = OTHER; note = 2'-O-methyluridine-3'-phosphate
  modified_base 7: mod_base = OTHER; note = 2'-deoxy-2'-fluorocytidine-3'-phosphate
  modified_base 8: mod_base = OTHER; note = 2'-deoxy-2'-fluorouridine-3'-phosphate
  modified_base 9: mod_base = OTHER; note = 2'-deoxy-2'-fluorouridine-3'-phosphate
  modified_base 10: mod_base = OTHER; note = 2'-O-methylcytidine-3'-phosphate
  modified_base 11: mod_base = OTHER; note = 2'-O-methyladenosine-3'-phosphate
  modified_base 12: mod_base = OTHER; note = 2'-O-methyladenosine-3'-phosphate
  modified_base 13: mod_base = OTHER; note = 2'-O-methyladenosine-3'-phosphate
  modified_base 14: mod_base = OTHER; note = 2'-O-methyladenosine-3'-phosphate
  modified_base 15: mod_base = OTHER; note = 2'-O-methyluridine-3'-phosphate
  modified_base 16: mod_base = OTHER; note = 2'-O-methyladenosine-3'-phosphate
  modified_base 17: mod_base = OTHER; note = 2'-O-methyladenosine-3'-phosphate
  modified_base 18: mod_base = OTHER; note = 2'-O-methyladenosine-3'-phosphate
  modified_base 19: mod_base = OTHER; note = 2'-O-methyluridine-3'-phosphate ((2S,4R)-1-[29-[[2-(acetylamino)-2-deoxy-beta-D-galactopyra nosyl]oxy]-14,14-bis[[3-[[3-[[5-[[2-(acetylamino)-2-deoxy-b eta-D-galactopyranosyl]oxy]-1-oxopentyl]amino]propyl]amino] -3-oxopropoxy]methyl]-1,12,19,25-tetraoxo-16-oxa-13,20,24-t riazanonacos-1-yl]-4-hydroxy-2-pyrrolidinyl)methyl ester
tcagatcttcaaaataaat

SEQ ID NO: 183 - RNA, 21 nt, synthetic construct
  source 1..21: mol_type = other RNA
  modified_base 1: mod_base = OTHER; note = 2'-O-methyladenosine-3'-phosphorothioate
  modified_base 2: mod_base = OTHER; note = 2'-deoxy-2'-fluorouridine-3'-phosphorothioate
  modified_base 3: mod_base = OTHER; note = 2'-O-methyluridine-3'-phosphate
  modified_base 4: mod_base = OTHER; note = 2'-O-methyluridine-3'-phosphate
  modified_base 5: mod_base = OTHER; note = 2'-O-methyladenosine-3'-phosphate
  modified_base 6: mod_base = OTHER; note = 2'-deoxy-2'-fluorouridine-3'-phosphate
  modified_base 7: mod_base = OTHER; note = 2'-O-methyluridine-3'-phosphate
  modified_base 8: mod_base = OTHER; note = 2'-O-methyluridine-3'-phosphate
  modified_base 9: mod_base = OTHER; note = 2'-O-methyluridine-3'-phosphate
  modified_base 10: mod_base = OTHER; note = 2'-O-methylguanosine-3'-phosphate
  modified_base 11: mod_base = OTHER; note = 2'-O-methyladenosine-3'-phosphate
  modified_base 12: mod_base = OTHER; note = 2'-deoxy-2'-fluoroadenosine-3'-phosphate
  modified_base 13: mod_base = OTHER; note = 2'-O-methylguanosine-3'-phosphate
  modified_base 14: mod_base = OTHER; note = 2'-deoxy-2'-fluoroadenosine-3'-phosphate
  modified_base 15: mod_base = OTHER; note = 2'-O-methyluridine-3'-phosphate
  modified_base 16: mod_base = OTHER; note = 2'-deoxy-2'-fluorocytidine-3'-phosphate
  modified_base 17: mod_base = OTHER; note = 2'-O-methyluridine-3'-phosphate
  modified_base 18: mod_base = OTHER; note = 2'-O-methylguanosine-3'-phosphate
  modified_base 19: mod_base = OTHER; note = 2'-O-methyladenosine-3'-phosphorothioate
  modified_base 20: mod_base = OTHER; note = 2'-O-methylcytidine-3'-phosphorothioate
  modified_base 21: mod_base = OTHER; note = 2'-O-methylcytidine
atttattttgaagatctgacc

SEQ ID NO: 184 - RNA, 21 nt, synthetic construct
  source 1..21: mol_type = other RNA
  modified_base 3: mod_base = OTHER; note = 5'-methyluridine-3'-phosphate
  modified_base 8: mod_base = OTHER; note = 5'-methyluridine-3'-phosphate
  modified_base 10: mod_base = OTHER; note = 5'-methyluridine-3'-phosphate
  modified_base 11: mod_base = OTHER; note = 5'-methyluridine-3'-phosphate
  modified_base 17: mod_base = OTHER; note = 5'-methyluridine-3'-phosphate
  modified_base 21: mod_base = OTHER; note = 5'-methyluridine
ggtcagatcttcaaaataaat

SEQ ID NO: 185 - RNA, 21 nt, synthetic construct
  source 1..21: mol_type = other RNA
  modified_base 1: mod_base = OTHER; note = 2'-O-methyladenosine-3'-phosphorothioate
  modified_base 2: mod_base = OTHER; note = 2'-O-methyladenosine-3'-phosphorothioate
  modified_base 3: mod_base = OTHER; note = 2'-O-methyluridine-3'-phosphate
  modified_base 4: mod_base = OTHER; note = 2'-O-methylguanosine-3'-phosphate
  modified_base 5: mod_base = OTHER; note = 2'-O-methylguanosine-3'-phosphate
  modified_base 6: mod_base = OTHER; note = 2'-O-methyluridine-3'-phosphate
  modified_base 7: mod_base = OTHER; note = 2'-deoxy-2'-fluorocytidine-3'-phosphate
  modified_base 8: mod_base = OTHER; note = 2'-O-methyladenosine-3'-phosphate
  modified_base 9: mod_base = OTHER; note = 2'-deoxy-2'-fluoroguanosine-3'-phosphate
  modified_base 10: mod_base = OTHER; note = 2'-deoxy-2'-fluoroadenosine-3'-phosphate
  modified_base 11: mod_base = OTHER; note = 2'-deoxy-2'-fluorouridine-3'-phosphate
  modified_base 12: mod_base = OTHER; note = 2'-O-methylcytidine-3'-phosphate
  modified_base 13: mod_base = OTHER; note = 2'-O-methyluridine-3'-phosphate
  modified_base 14: mod_base = OTHER; note = 2'-O-methyluridine-3'-phosphate
  modified_base 15: mod_base = OTHER; note = 2'-O-methylcytidine-3'-phosphate
  modified_base 16: mod_base = OTHER; note = 2'-O-methyladenosine-3'-phosphate
  modified_base 17: mod_base = OTHER; note = 2'-O-methyladenosine-3'-phosphate
  modified_base 18: mod_base = OTHER; note = 2'-O-methyladenosine-3'-phosphate
  modified_base 19: mod_base = OTHER; note = 2'-O-methyladenosine-3'-phosphate
  modified_base 20: mod_base = OTHER; note = 2'-O-methyluridine-3'-phosphate
  modified_base 21: mod_base = OTHER; note = 2'-O-methyladenosine-3'-phosphate ((2S,4R)-1-[29-[[2-(acetylamino)-2-deoxy-beta-D-galactopyra nosyl]oxy]-14,14-bis[[3-[[3-[[5-[[2-(acetylamino)-2-deoxy-b eta-D-galactopyranosyl]oxy]-1-oxopentyl]amino]propyl]amino] -3-oxopropoxy]methyl]-1,12,19,25-tetraoxo-16-oxa-13,20,24-t riazanonacos-1-yl]-4-hydroxy-2-pyrrolidinyl)methyl ester
aatggtcagatcttcaaaata

SEQ ID NO: 186 - RNA, 23 nt, synthetic construct
  source 1..23: mol_type = other RNA
  modified_base 1: mod_base = OTHER; note = 2'-O-methyluridine-3'-phosphorothioate
  modified_base 2: mod_base = OTHER; note = 2'-deoxy-2'-fluoroadenosine-3'-phosphorothioate
  modified_base 3: mod_base = OTHER; note = 2'-O-methyluridine-3'-phosphate
  modified_base 4: mod_base = OTHER; note = 2'-O-methyluridine-3'-phosphate
  modified_base 5: mod_base = OTHER; note = 2'-O-methyluridine-3'-phosphate
  modified_base 6: mod_base = OTHER; note = 2'-deoxy-2'-fluorouridine-3'-phosphate
  modified_base 7: mod_base = OTHER; note = 2'-O-methylguanosine-3'-phosphate
  modified_base 8: mod_base = OTHER; note = 2'-deoxy-2'-fluoroadenosine-3'-phosphate
  modified_base 9: mod_base = OTHER; note = 2'-deoxy-2'-fluoroadenosine-3'-phosphate
  modified_base 10: mod_base = OTHER; note = 2'-O-methylguanosine-3'-phosphate
  modified_base 11: mod_base = OTHER; note = 2'-O-methyladenosine-3'-phosphate
  modified_base 12: mod_base = OTHER; note = 2'-O-methyluridine-3'-phosphate
  modified_base 13: mod_base = OTHER; note = 2'-O-methylcytidine-3'-phosphate
  modified_base 14: mod_base = OTHER; note = 2'-deoxy-2'-fluorouridine-3'-phosphate
  modified_base 15: mod_base = OTHER; note = 2'-O-methylguanosine-3'-phosphate
  modified_base 16: mod_base = OTHER; note = 2'-deoxy-2'-fluoroadenosine-3'-phosphate
  modified_base 17: mod_base = OTHER; note = 2'-O-methylcytidine-3'-phosphate
  modified_base 18: mod_base = OTHER; note = 2'-O-methylcytidine-3'-phosphate
  modified_base 19: mod_base = OTHER; note = 2'-O-methyladenosine-3'-phosphate
  modified_base 20: mod_base = OTHER; note = 2'-O-methyluridine-3'-phosphate
  modified_base 21: mod_base = OTHER; note = 2'-O-methyluridine-3'-phosphorothioate
  modified_base 22: mod_base = OTHER; note = 2'-O-methylguanosine-3'-phosphorothioate
  modified_base 23: mod_base = OTHER; note = 2'-O-methylguanosine
tattttgaagatctgaccattgg

SEQ ID NO: 187 - RNA, 23 nt, synthetic construct
  source 1..23: mol_type = other RNA
  modified_base 5: mod_base = OTHER; note = 5'-methyluridine-3'-phosphate
  modified_base 8: mod_base = OTHER; note = 5'-methyluridine-3'-phosphate
  modified_base 13: mod_base = OTHER; note = 5'-methyluridine-3'-phosphate
  modified_base 15: mod_base = OTHER; note = 5'-methyluridine-3'-phosphate
  modified_base 16: mod_base = OTHER; note = 5'-methyluridine-3'-phosphate
  modified_base 22: mod_base = OTHER; note = 5'-methyluridine-3'-phosphate
ccaatggtcagatcttcaaaata

SEQ ID NO: 188 - RNA, 21 nt, synthetic construct
  source 1..21: mol_type = other RNA
  modified_base 1: mod_base = OTHER; note = 2'-O-methyladenosine-3'-phosphorothioate
  modified_base 2: mod_base = OTHER; note = 2'-O-methyladenosine-3'-phosphorothioate
  modified_base 3: mod_base = OTHER; note = 2'-O-methyluridine-3'-phosphate
  modified_base 4: mod_base = OTHER; note = 2'-O-methylguanosine-3'-phosphate
  modified_base 5: mod_base = OTHER; note = 2'-O-methylguanosine-3'-phosphate
  modified_base 6: mod_base = OTHER; note = 2'-O-methyluridine-3'-phosphate
  modified_base 7: mod_base = OTHER; note = 2'-deoxy-2'-fluorocytidine-3'-phosphate
  modified_base 8: mod_base = OTHER; note = 2'-O-methyladenosine-3'-phosphate
  modified_base 9: mod_base = OTHER; note = 2'-deoxy-2'-fluoroguanosine-3'-phosphate
  modified_base 10: mod_base = OTHER; note = 2'-deoxy-2'-fluoroadenosine-3'-phosphate
  modified_base 11: mod_base = OTHER; note = 2'-deoxy-2'-fluorouridine-3'-phosphate
  modified_base 12: mod_base = OTHER; note = 2'-O-methylcytidine-3'-phosphate
  modified_base 13: mod_base = OTHER; note = 2'-O-methyluridine-3'-phosphate
  modified_base 14: mod_base = OTHER; note = 2'-O-methyluridine-3'-phosphate
  modified_base 15: mod_base = OTHER; note = 2'-O-methylcytidine-3'-phosphate
  modified_base 16: mod_base = OTHER; note = 2'-O-methyladenosine-3'-phosphate
  modified_base 17: mod_base = OTHER; note = 2'-O-methyladenosine-3'-phosphate
  modified_base 18: mod_base = OTHER; note = 2'-O-methyladenosine-3'-phosphate
  modified_base 19: mod_base = OTHER; note = 2'-O-methyladenosine-3'-phosphate
  modified_base 20: mod_base = OTHER; note = 2'-O-methyluridine-3'-phosphate
  modified_base 21: mod_base = OTHER; note = 2'-O-methyladenosine-3'-phosphate ((2S,4R)-1-[29-[[2-(acetylamino)-2-deoxy-beta-D-galactopyra nosyl]oxy]-14,14-bis[[3-[[3-[[5-[[2-(acetylamino)-2-deoxy-b eta-D-galactopyranosyl]oxy]-1-oxopentyl]amino]propyl]amino] -3-oxopropoxy]methyl]-1,12,19,25-tetraoxo-16-oxa-13,20,24-t riazanonacos-1-yl]-4-hydroxy-2-pyrrolidinyl)methyl ester
aatggtcagatcttcaaaata

SEQ ID NO: 189 - RNA, 23 nt, synthetic construct
  source 1..23: mol_type = other RNA
  modified_base 1: mod_base = OTHER; note = 2'-O-methyluridine-3'-phosphorothioate
  modified_base 2: mod_base = OTHER; note = 2'-deoxy-2'-fluoroadenosine-3'-phosphorothioate
  modified_base 3: mod_base = OTHER; note = 2'-O-methyluridine-3'-phosphate
  modified_base 4: mod_base = OTHER; note = 2'-O-methyluridine-3'-phosphate
  modified_base 5: mod_base = OTHER; note = 2'-O-methyluridine-3'-phosphate
  modified_base 6: mod_base = OTHER; note = 2'-deoxy-2'-fluorouridine-3'-phosphate
  modified_base 7: mod_base = OTHER; note = 2'-O-methylguanosine-3'-phosphate
  modified_base 8: mod_base = OTHER; note = 2'-deoxy-2'-fluoroadenosine-3'-phosphate
  modified_base 9: mod_base = OTHER; note = 2'-deoxy-2'-fluoroadenosine-3'-phosphate
  modified_base 10: mod_base = OTHER; note = 2'-O-methylguanosine-3'-phosphate
  modified_base 11: mod_base = OTHER; note = 2'-O-methyladenosine-3'-phosphate
  modified_base 12: mod_base = OTHER; note = 2'-O-methyluridine-3'-phosphate
  modified_base 13: mod_base = OTHER; note = 2'-O-methylcytidine-3'-phosphate
  modified_base 14: mod_base = OTHER; note = 2'-deoxy-2'-fluorouridine-3'-phosphate
  modified_base 15: mod_base = OTHER; note = 2'-O-methylguanosine-3'-phosphate
  modified_base 16: mod_base = OTHER; note = 2'-deoxy-2'-fluoroadenosine-3'-phosphate
  modified_base 17: mod_base = OTHER; note = 2'-O-methylcytidine-3'-phosphate
  modified_base 18: mod_base = OTHER; note = 2'-O-methylcytidine-3'-phosphate
  modified_base 19: mod_base = OTHER; note = 2'-O-methyladenosine-3'-phosphate
  modified_base 20: mod_base = OTHER; note = 2'-O-methyluridine-3'-phosphate
  modified_base 21: mod_base = OTHER; note = 2'-O-methyluridine-3'-phosphorothioate
  modified_base 22: mod_base = OTHER; note = 2'-O-methylguanosine-3'-phosphorothioate
  modified_base 23: mod_base = OTHER; note = 2'-O-methyluridine
tattttgaagatctgaccattgt

SEQ ID NO: 190 - RNA, 23 nt, synthetic construct
  source 1..23: mol_type = other RNA
  modified_base 5: mod_base = OTHER; note = 5'-methyluridine-3'-phosphate
  modified_base 8: mod_base = OTHER; note = 5'-methyluridine-3'-phosphate
  modified_base 13: mod_base = OTHER; note = 5'-methyluridine-3'-phosphate
  modified_base 15: mod_base = OTHER; note = 5'-methyluridine-3'-phosphate
  modified_base 16: mod_base = OTHER; note = 5'-methyluridine-3'-phosphate
  modified_base 22: mod_base = OTHER; note = 5'-methyluridine-3'-phosphate
acaatggtcagatcttcaaaata

SEQ ID NO: 191 - RNA, 21 nt, synthetic construct
  source 1..21: mol_type = other RNA
  modified_base 1: mod_base = OTHER; note = 2'-O-methyladenosine-3'-phosphorothioate
  modified_base 2: mod_base = OTHER; note = 2'-O-methyladenosine-3'-phosphorothioate
  modified_base 3: mod_base = OTHER; note = 2'-O-methyluridine-3'-phosphate
  modified_base 4: mod_base = OTHER; note = 2'-O-methylguanosine-3'-phosphate
  modified_base 5: mod_base = OTHER; note = 2'-O-methylguanosine-3'-phosphate
  modified_base 6: mod_base = OTHER; note = 2'-O-methyluridine-3'-phosphate
  modified_base 7: mod_base = OTHER; note = 2'-deoxy-2'-fluorocytidine-3'-phosphate
  modified_base 8: mod_base = OTHER; note = 2'-O-methyladenosine-3'-phosphate
  modified_base 9: mod_base = OTHER; note = 2'-deoxy-2'-fluoroguanosine-3'-phosphate
  modified_base 10: mod_base = OTHER; note = 2'-deoxy-2'-fluoroadenosine-3'-phosphate
  modified_base 11: mod_base = OTHER; note = 2'-deoxy-2'-fluorouridine-3'-phosphate
  modified_base 12: mod_base = OTHER; note = 2'-O-methylcytidine-3'-phosphate
  modified_base 13: mod_base = OTHER; note = 2'-O-methyluridine-3'-phosphate
  modified_base 14: mod_base = OTHER; note = 2'-O-methyluridine-3'-phosphate
  modified_base 15: mod_base = OTHER; note = 2'-O-methylcytidine-3'-phosphate
  modified_base 16: mod_base = OTHER; note = 2'-O-methyladenosine-3'-phosphate
  modified_base 17: mod_base = OTHER; note = 2'-O-methyladenosine-3'-phosphate
  modified_base 18: mod_base = OTHER; note = 2'-O-methyladenosine-3'-phosphate
  modified_base 19: mod_base = OTHER; note = 2'-O-methyladenosine-3'-phosphate
  modified_base 20: mod_base = OTHER; note = 2'-O-methyluridine-3'-phosphate
  modified_base 21: mod_base = OTHER; note = 2'-O-methyladenosine-3'-phosphate ((2S,4R)-1-[29-[[2-(acetylamino)-2-deoxy-beta-D-galactopyra nosyl]oxy]-14,14-bis[[3-[[3-[[5-[[2-(acetylamino)-2-deoxy-b eta-D-galactopyranosyl]oxy]-1-oxopentyl]amino]propyl]amino] -3-oxopropoxy]methyl]-1,12,19,25-tetraoxo-16-oxa-13,20,24-t riazanonacos-1-yl]-4-hydroxy-2-pyrrolidinyl)methyl ester
aatggtcagatcttcaaaata

SEQ ID NO: 192 - RNA, 23 nt, synthetic construct
  source 1..23: mol_type = other RNA
  modified_base 1: mod_base = OTHER; note = 2'-O-methyluridine-3'-phosphorothioate
  modified_base 2: mod_base = OTHER; note = 2'-deoxy-2'-fluoroadenosine-3'-phosphorothioate
  modified_base 3: mod_base = OTHER; note = 2'-O-methyluridine-3'-phosphate
  modified_base 4: mod_base = OTHER; note = 2'-O-methyluridine-3'-phosphate
  modified_base 5: mod_base = OTHER; note = 2'-O-methyluridine-3'-phosphate
  modified_base 6: mod_base = OTHER; note = 2'-deoxy-2'-fluorouridine-3'-phosphate
  modified_base 7: mod_base = OTHER; note = 2'-O-methylguanosine-3'-phosphate
  modified_base 8: mod_base = OTHER; note = 2'-deoxy-2'-fluoroadenosine-3'-phosphate
  modified_base 9: mod_base = OTHER; note = 2'-deoxy-2'-fluoroadenosine-3'-phosphate
  modified_base 10: mod_base = OTHER; note = 2'-O-methylguanosine-3'-phosphate
  modified_base 11: mod_base = OTHER; note = 2'-O-methyladenosine-3'-phosphate
  modified_base 12: mod_base = OTHER; note = 2'-O-methyluridine-3'-phosphate
  modified_base 13: mod_base = OTHER; note = 2'-O-methylcytidine-3'-phosphate
  modified_base 14: mod_base = OTHER; note = 2'-deoxy-2'-fluorouridine-3'-phosphate
  modified_base 15: mod_base = OTHER; note = 2'-O-methylguanosine-3'-phosphate
  modified_base 16: mod_base = OTHER; note = 2'-deoxy-2'-fluoroadenosine-3'-phosphate
  modified_base 17: mod_base = OTHER; note = 2'-O-methylcytidine-3'-phosphate
  modified_base 18: mod_base = OTHER; note = 2'-O-methylcytidine-3'-phosphate
  modified_base 19: mod_base = OTHER; note = 2'-O-methyladenosine-3'-phosphate
  modified_base 20: mod_base = OTHER; note = 2'-O-methyluridine-3'-phosphate
  modified_base 21: mod_base = OTHER; note = 2'-O-methyluridine-3'-phosphorothioate
  modified_base 22: mod_base = OTHER; note = 2'-O-methylcytidine-3'-phosphorothioate
  modified_base 23: mod_base = OTHER; note = 2'-O-methyluridine
tattttgaagatctgaccattct

SEQ ID NO: 193 - RNA, 23 nt, synthetic construct
  source 1..23: mol_type = other RNA
  modified_base 5: mod_base = OTHER; note = 5'-methyluridine-3'-phosphate
  modified_base 8: mod_base = OTHER; note = 5'-methyluridine-3'-phosphate
  modified_base 13: mod_base = OTHER; note = 5'-methyluridine-3'-phosphate
  modified_base 15: mod_base = OTHER; note = 5'-methyluridine-3'-phosphate
  modified_base 16: mod_base = OTHER; note = 5'-methyluridine-3'-phosphate
  modified_base 22: mod_base = OTHER; note = 5'-methyluridine-3'-phosphate
agaatggtcagatcttcaaaata

SEQ ID NO: 194 - RNA, 19 nt, synthetic construct
  source 1..19: mol_type = other RNA
  modified_base 1: mod_base = OTHER; note = 2'-O-methyluridine-3'-phosphorothioate
  modified_base 2: mod_base = OTHER; note = 2'-O-methylguanosine-3'-phosphorothioate
  modified_base 3: mod_base = OTHER; note = 2'-O-methylguanosine-3'-phosphate
  modified_base 4: mod_base = OTHER; note = 2'-O-methyluridine-3'-phosphate
  modified_base 5: mod_base = OTHER; note = 2'-deoxy-2'-fluorocytidine-3'-phosphate
  modified_base 6: mod_base = OTHER; note = 2'-O-methyladenosine-3'-phosphate
  modified_base 7: mod_base = OTHER; note = 2'-deoxy-2'-fluoroguanosine-3'-phosphate
  modified_base 8: mod_base = OTHER; note = 2'-deoxy-2'-fluoroadenosine-3'-phosphate
  modified_base 9: mod_base = OTHER; note = 2'-deoxy-2'-fluorouridine-3'-phosphate
  modified_base 10: mod_base = OTHER; note = 2'-O-methylcytidine-3'-phosphate
  modified_base 11: mod_base = OTHER; note = 2'-O-methyluridine-3'-phosphate
  modified_base 12: mod_base = OTHER; note = 2'-O-methyluridine-3'-phosphate
  modified_base 13: mod_base = OTHER; note = 2'-O-methylcytidine-3'-phosphate
  modified_base 14: mod_base = OTHER; note = 2'-O-methyladenosine-3'-phosphate
  modified_base 15: mod_base = OTHER; note = 2'-O-methyladenosine-3'-phosphate
  modified_base 16: mod_base = OTHER; note = 2'-O-methyladenosine-3'-phosphate
  modified_base 17: mod_base = OTHER; note = 2'-O-methyladenosine-3'-phosphate
  modified_base 18: mod_base = OTHER; note = 2'-O-methyluridine-3'-phosphate
  modified_base 19: mod_base = OTHER; note = 2'-O-methyladenosine-3'-phosphate ((2S,4R)-1-[29-[[2-(acetylamino)-2-deoxy-beta-D-galactopyra nosyl]oxy]-14,14-bis[[3-[[3-[[5-[[2-(acetylamino)-2-deoxy-b eta-D-galactopyranosyl]oxy]-1-oxopentyl]amino]propyl]amino] -3-oxopropoxy]methyl]-1,12,19,25-tetraoxo-16-oxa-13,20,24-t riazanonacos-1-yl]-4-hydroxy-2-pyrrolidinyl)methyl ester
tggtcagatcttcaaaata

SEQ ID NO: 195 - RNA, 21 nt, synthetic construct
  source 1..21: mol_type = other RNA
  modified_base 1: mod_base = OTHER; note = 2'-O-methyluridine-3'-phosphorothioate
  modified_base 2: mod_base = OTHER; note = 2'-deoxy-2'-fluoroadenosine-3'-phosphorothioate
  modified_base 3: mod_base = OTHER; note = 2'-O-methyluridine-3'-phosphate
  modified_base 4: mod_base = OTHER; note = 2'-O-methyluridine-3'-phosphate
  modified_base 5: mod_base = OTHER; note = 2'-O-methyluridine-3'-phosphate
  modified_base 6: mod_base = OTHER; note = 2'-deoxy-2'-fluorouridine-3'-phosphate
  modified_base 7: mod_base = OTHER; note = 2'-O-methylguanosine-3'-phosphate
  modified_base 8: mod_base = OTHER; note = 2'-deoxy-2'-fluoroadenosine-3'-phosphate
  modified_base 9: mod_base = OTHER; note = 2'-deoxy-2'-fluoroadenosine-3'-phosphate
  modified_base 10: mod_base = OTHER; note = 2'-O-methylguanosine-3'-phosphate
  modified_base 11: mod_base = OTHER; note = 2'-O-methyladenosine-3'-phosphate
  modified_base 12: mod_base = OTHER; note = 2'-O-methyluridine-3'-phosphate
  modified_base 13: mod_base = OTHER; note = 2'-O-methylcytidine-3'-phosphate
  modified_base 14: mod_base = OTHER; note = 2'-deoxy-2'-fluorouridine-3'-phosphate
  modified_base 15: mod_base = OTHER; note = 2'-O-methylguanosine-3'-phosphate
  modified_base 16: mod_base = OTHER; note = 2'-deoxy-2'-fluoroadenosine-3'-phosphate
  modified_base 17: mod_base = OTHER; note = 2'-O-methylcytidine-3'-phosphate
  modified_base 18: mod_base = OTHER; note = 2'-O-methylcytidine-3'-phosphate
  modified_base 19: mod_base = OTHER; note = 2'-O-methyladenosine-3'-phosphorothioate
  modified_base 20: mod_base = OTHER; note = 2'-O-methyluridine-3'-phosphorothioate
  modified_base 21: mod_base = OTHER; note = 2'-O-methyluridine
tattttgaagatctgaccatt

SEQ ID NO: 196 - RNA, 21 nt, synthetic construct
  source 1..21: mol_type = other RNA
  modified_base 3: mod_base = OTHER; note = 5'-methyluridine-3'-phosphate
  modified_base 6: mod_base = OTHER; note = 5'-methyluridine-3'-phosphate
  modified_base 11: mod_base = OTHER; note = 5'-methyluridine-3'-phosphate
  modified_base 13: mod_base = OTHER; note = 5'-methyluridine-3'-phosphate
  modified_base 14: mod_base = OTHER; note = 5'-methyluridine-3'-phosphate
  modified_base 20: mod_base = OTHER; note = 5'-methyluridine-3'-phosphate
aatggtcagatcttcaaaata

SEQ ID NO: 197 - RNA, 21 nt, synthetic construct
  source 1..21: mol_type = other RNA
  modified_base 1: mod_base = OTHER; note = 2'-O-methyladenosine-3'-phosphorothioate
  modified_base 2: mod_base = OTHER; note = 2'-O-methyladenosine-3'-phosphorothioate
  modified_base 3: mod_base = OTHER; note = 2'-O-methyluridine-3'-phosphate
  modified_base 4: mod_base = OTHER; note = 2'-O-methylguanosine-3'-phosphate
  modified_base 5: mod_base = OTHER; note = 2'-O-methylguanosine-3'-phosphate
  modified_base 6: mod_base = OTHER; note = 2'-O-methyluridine-3'-phosphate
  modified_base 7: mod_base = OTHER; note = 2'-deoxy-2'-fluorocytidine-3'-phosphate
  modified_base 8: mod_base = OTHER; note = 2'-O-methyladenosine-3'-phosphate
  modified_base 9: mod_base = OTHER; note = 2'-deoxy-2'-fluoroguanosine-3'-phosphate
  modified_base 10: mod_base = OTHER; note = 2'-deoxy-2'-fluoroadenosine-3'-phosphate
  modified_base 11: mod_base = OTHER; note = 2'-deoxy-2'-fluorouridine-3'-phosphate
  modified_base 12: mod_base = OTHER; note = 2'-O-methylcytidine-3'-phosphate
  modified_base 13: mod_base = OTHER; note = 2'-O-methyluridine-3'-phosphate
  modified_base 14: mod_base = OTHER; note = 2'-O-methyluridine-3'-phosphate
  modified_base 15: mod_base = OTHER; note = 2'-O-methylcytidine-3'-phosphate
  modified_base 16: mod_base = OTHER; note = 2'-O-methyladenosine-3'-phosphate
  modified_base 17: mod_base = OTHER; note = 2'-O-methyladenosine-3'-phosphate
  modified_base 18: mod_base = OTHER; note = 2'-O-methyladenosine-3'-phosphate
  modified_base 19: mod_base = OTHER; note = 2'-O-methyladenosine-3'-phosphate
  modified_base 20: mod_base = OTHER; note = 2'-O-methyluridine-3'-phosphate
  modified_base 21: mod_base = OTHER; note = 2'-O-methyladenosine-3'-phosphate ((2S,4R)-1-[29-[[2-(acetylamino)-2-deoxy-beta-D-galactopyra nosyl]oxy]-14,14-bis[[3-[[3-[[5-[[2-(acetylamino)-2-deoxy-b eta-D-galactopyranosyl]oxy]-1-oxopentyl]amino]propyl]amino] -3-oxopropoxy]methyl]-1,12,19,25-tetraoxo-16-oxa-13,20,24-t riazanonacos-1-yl]-4-hydroxy-2-pyrrolidinyl)methyl ester
aatggtcagatcttcaaaata

SEQ ID NO: 198 - RNA, 23 nt, synthetic construct
  source 1..23: mol_type = other RNA
  modified_base 1: mod_base = OTHER; note = 2'-O-methyluridine-3'-phosphorothioate
  modified_base 2: mod_base = OTHER; note = 2'-deoxy-2'-fluoroadenosine-3'-phosphorothioate
  modified_base 3: mod_base = OTHER; note = 2'-O-methyluridine-3'-phosphate
  modified_base 4: mod_base = OTHER; note = 2'-O-methyluridine-3'-phosphate
  modified_base 5: mod_base = OTHER; note = 2'-O-methyluridine-3'-phosphate
  modified_base 6: mod_base = OTHER; note = 2'-deoxy-2'-fluorouridine-3'-phosphate
  modified_base 7: mod_base = OTHER; note = 2'-O-methylguanosine-3'-phosphate
  modified_base 8: mod_base = OTHER; note = 2'-deoxy-2'-fluoroadenosine-3'-phosphate
  modified_base 9: mod_base = OTHER; note = 2'-deoxy-2'-fluoroadenosine-3'-phosphate
  modified_base 10: mod_base = OTHER; note = 2'-O-methylguanosine-3'-phosphate
  modified_base 11: mod_base = OTHER; note = 2'-O-methyladenosine-3'-phosphate
  modified_base 12: mod_base = OTHER; note = 2'-deoxy-2'-fluorouridine-3'-phosphate
  modified_base 13: mod_base = OTHER; note = 2'-O-methylcytidine-3'-phosphate
  modified_base 14: mod_base = OTHER; note = 2'-deoxy-2'-fluorouridine-3'-phosphate
  modified_base 15: mod_base = OTHER; note = 2'-O-methylguanosine-3'-phosphate
  modified_base 16: mod_base = OTHER; note = 2'-deoxy-2'-fluoroadenosine-3'-phosphate
  modified_base 17: mod_base = OTHER; note = 2'-O-methylcytidine-3'-phosphate
  modified_base 18: mod_base = OTHER; note = 2'-O-methylcytidine-3'-phosphate
  modified_base 19: mod_base = OTHER; note = 2'-O-methyladenosine-3'-phosphate
  modified_base 20: mod_base = OTHER; note = 2'-O-methyluridine-3'-phosphate
  modified_base 21: mod_base = OTHER; note = 2'-O-methyluridine-3'-phosphorothioate
  modified_base 22: mod_base = OTHER; note = 2'-O-methylguanosine-3'-phosphorothioate
  modified_base 23: mod_base = OTHER; note = 2'-O-methylguanosine
tattttgaagatctgaccattgg

SEQ ID NO: 199 - RNA, 23 nt, synthetic construct
  source 1..23: mol_type = other RNA
  modified_base 5: mod_base = OTHER; note = 5'-methyluridine-3'-phosphate
  modified_base 8: mod_base = OTHER; note = 5'-methyluridine-3'-phosphate
  modified_base 13: mod_base = OTHER; note = 5'-methyluridine-3'-phosphate
  modified_base 15: mod_base = OTHER; note = 5'-methyluridine-3'-phosphate
  modified_base 16: mod_base = OTHER; note = 5'-methyluridine-3'-phosphate
  modified_base 22: mod_base = OTHER; note = 5'-methyluridine-3'-phosphate
ccaatggtcagatcttcaaaata

SEQ ID NO: 200 - RNA, 21 nt, synthetic construct
  source 1..21: mol_type = other RNA
  modified_base 1: mod_base = OTHER; note = 2'-O-methyladenosine-3'-phosphorothioate
  modified_base 2: mod_base = OTHER; note = 2'-O-methyladenosine-3'-phosphorothioate
  modified_base 3: mod_base = OTHER; note = 2'-O-methyluridine-3'-phosphate
  modified_base 4: mod_base = OTHER; note = 2'-O-methylguanosine-3'-phosphate
  modified_base 5: mod_base = OTHER; note = 2'-O-methylguanosine-3'-phosphate
  modified_base 6: mod_base = OTHER; note = 2'-O-methyluridine-3'-phosphate
  modified_base 7: mod_base = OTHER; note = 2'-O-methylcytidine-3'-phosphate
  modified_base 8: mod_base = OTHER; note = 2'-O-methyladenosine-3'-phosphate
  modified_base 9: mod_base = OTHER; note = 2'-deoxy-2'-fluoroguanosine-3'-phosphate
  modified_base 10: mod_base = OTHER; note = 2'-deoxy-2'-fluoroadenosine-3'-phosphate
  modified_base 11: mod_base = OTHER; note = 2'-deoxy-2'-fluorouridine-3'-phosphate
  modified_base 12: mod_base = OTHER; note = 2'-O-methylcytidine-3'-phosphate
  modified_base 13: mod_base = OTHER; note = 2'-O-methyluridine-3'-phosphate
  modified_base 14: mod_base = OTHER; note = 2'-O-methyluridine-3'-phosphate
  modified_base 15: mod_base = OTHER; note = 2'-O-methylcytidine-3'-phosphate
  modified_base 16: mod_base = OTHER; note = 2'-O-methyladenosine-3'-phosphate
  modified_base 17: mod_base = OTHER; note = 2'-O-methyladenosine-3'-phosphate
  modified_base 18: mod_base = OTHER; note = 2'-O-methyladenosine-3'-phosphate
  modified_base 19: mod_base = OTHER; note = 2'-O-methyladenosine-3'-phosphate
  modified_base 20: mod_base = OTHER; note = 2'-O-methyluridine-3'-phosphate
  modified_base 21: mod_base = OTHER; note = 2'-O-methyladenosine-3'-phosphate ((2S,4R)-1-[29-[[2-(acetylamino)-2-deoxy-beta-D-galactopyra nosyl]oxy]-14,14-bis[[3-[[3-[[5-[[2-(acetylamino)-2-deoxy-b eta-D-galactopyranosyl]oxy]-1-oxopentyl]amino]propyl]amino] -3-oxopropoxy]methyl]-1,12,19,25-tetraoxo-16-oxa-13,20,24-t riazanonacos-1-yl]-4-hydroxy-2-pyrrolidinyl)methyl ester
aatggtcagatcttcaaaata

SEQ ID NO: 201 - RNA, 23 nt, synthetic construct
  source 1..23: mol_type = other RNA
  modified_base 1: mod_base = OTHER; note = 2'-O-methyluridine-3'-phosphorothioate
  modified_base 2: mod_base = OTHER; note = 2'-deoxy-2'-fluoroadenosine-3'-phosphorothioate
  modified_base 3: mod_base = OTHER; note = 2'-O-methyluridine-3'-phosphate
  modified_base 4: mod_base = OTHER; note = 2'-O-methyluridine-3'-phosphate
  modified_base 5: mod_base = OTHER; note = 2'-O-methyluridine-3'-phosphate
  modified_base 6: mod_base = OTHER; note = 2'-deoxy-2'-fluorouridine-3'-phosphate
  modified_base 7: mod_base = OTHER; note = 2'-O-methylguanosine-3'-phosphate
  modified_base 8: mod_base = OTHER; note = 2'-deoxy-2'-fluoroadenosine-3'-phosphate
  modified_base 9: mod_base = OTHER; note = 2'-deoxy-2'-fluoroadenosine-3'-phosphate
  modified_base 10: mod_base = OTHER; note = 2'-O-methylguanosine-3'-phosphate
  modified_base 11: mod_base = OTHER; note = 2'-O-methyladenosine-3'-phosphate
  modified_base 12: mod_base = OTHER; note = 2'-O-methyluridine-3'-phosphate
  modified_base 13: mod_base = OTHER; note = 2'-O-methylcytidine-3'-phosphate
  modified_base 14: mod_base = OTHER; note = 2'-deoxy-2'-fluorouridine-3'-phosphate
  modified_base 15: mod_base = OTHER; note = 2'-O-methylguanosine-3'-phosphate
  modified_base 16: mod_base = OTHER; note = 2'-deoxy-2'-fluoroadenosine-3'-phosphate
  modified_base 17: mod_base = OTHER; note = 2'-O-methylcytidine-3'-phosphate
  modified_base 18: mod_base = OTHER; note = 2'-O-methylcytidine-3'-phosphate
  modified_base 19: mod_base = OTHER; note = 2'-O-methyladenosine-3'-phosphate
  modified_base 20: mod_base = OTHER; note = 2'-O-methyluridine-3'-phosphate
  modified_base 21: mod_base = OTHER; note = 2'-O-methyluridine-3'-phosphorothioate
  modified_base 22: mod_base = OTHER; note = 2'-O-methylguanosine-3'-phosphorothioate
  modified_base 23: mod_base = OTHER; note = 2'-O-methylguanosine
tattttgaagatctgaccattgg

SEQ ID NO: 202 - RNA, 23 nt, synthetic construct
  source 1..23: mol_type = other RNA
  modified_base 5: mod_base = OTHER; note = 5'-methyluridine-3'-phosphate
  modified_base 8: mod_base = OTHER; note = 5'-methyluridine-3'-phosphate
  modified_base 13: mod_base = OTHER; note = 5'-methyluridine-3'-phosphate
  modified_base 15: mod_base = OTHER; note = 5'-methyluridine-3'-phosphate
  modified_base 16: mod_base = OTHER; note = 5'-methyluridine-3'-phosphate
  modified_base 22: mod_base = OTHER; note = 5'-methyluridine-3'-phosphate
ccaatggtcagatcttcaaaata

SEQ ID NO: 203 - RNA, 21 nt, synthetic construct
  source 1..21: mol_type = other RNA
  modified_base 1: mod_base = OTHER; note = 2'-O-methyladenosine-3'-phosphorothioate
  modified_base 2: mod_base = OTHER; note = 2'-O-methyladenosine-3'-phosphorothioate
  modified_base 3: mod_base = OTHER; note = 2'-O-methyluridine-3'-phosphate
  modified_base 4: mod_base = OTHER; note = 2'-O-methylguanosine-3'-phosphate
  modified_base 5: mod_base = OTHER; note = 2'-O-methylguanosine-3'-phosphate
  modified_base 6: mod_base = OTHER; note = 2'-O-methyluridine-3'-phosphate
  modified_base 7: mod_base = OTHER; note = 2'-deoxy-2'-fluorocytidine-3'-phosphate
  modified_base 8: mod_base = OTHER; note = 2'-O-methyladenosine-3'-phosphate
  modified_base 9: mod_base = OTHER; note = 2'-deoxy-2'-fluoroguanosine-3'-phosphate
  modified_base 10: mod_base = OTHER; note = 2'-deoxy-2'-fluoroadenosine-3'-phosphate
  modified_base 11: mod_base = OTHER; note = 2'-deoxy-2'-fluorouridine-3'-phosphate
  modified_base 12: mod_base = OTHER; note = 2'-O-methylcytidine-3'-phosphate
  modified_base 13: mod_base = OTHER; note = 2'-O-methyluridine-3'-phosphate
  modified_base 14: mod_base = OTHER; note = 2'-O-methyluridine-3'-phosphate
  modified_base 15: mod_base = OTHER; note = 2'-O-methylcytidine-3'-phosphate
  modified_base 16: mod_base = OTHER; note = 2'-O-methyladenosine-3'-phosphate
  modified_base 17: mod_base = OTHER; note = 2'-O-methyladenosine-3'-phosphate
  modified_base 18: mod_base = OTHER; note = 2'-O-methyladenosine-3'-phosphate
  modified_base 19: mod_base = OTHER; note = 2'-O-methyladenosine-3'-phosphate
  modified_base 20: mod_base = OTHER; note = 2'-O-methyluridine-3'-phosphate
  modified_base 21: mod_base = OTHER; note = 2'-O-methyladenosine-3'-phosphate ((2S,4R)-1-[29-[[2-(acetylamino)-2-deoxy-beta-D-galactopyra nosyl]oxy]-14,14-bis[[3-[[3-[[5-[[2-(acetylamino)-2-deoxy-b eta-D-galactopyranosyl]oxy]-1-oxopentyl]amino]propyl]amino] -3-oxopropoxy]methyl]-1,12,19,25-tetraoxo-16-oxa-13,20,24-t riazanonacos-1-yl]-4-hydroxy-2-pyrrolidinyl)methyl ester
aatggtcagatcttcaaaata

SEQ ID NO: 204 - RNA, 23 nt, synthetic construct
  source 1..23: mol_type = other RNA
  modified_base 1: mod_base = OTHER; note = 2'-O-methyluridine-3'-phosphorothioate
  modified_base 2: mod_base = OTHER; note = 2'-deoxy-2'-fluoroadenosine-3'-phosphorothioate
  modified_base 3: mod_base = OTHER; note = 2'-O-methyluridine-3'-phosphate
  modified_base 4: mod_base = OTHER; note = 2'-O-methyluridine-3'-phosphate
  modified_base 5: mod_base = OTHER; note = 2'-O-methyluridine-3'-phosphate
  modified_base 6: mod_base = OTHER; note = 2'-deoxy-2'-fluorouridine-3'-phosphate
  modified_base 7: mod_base = OTHER; note = 2'-O-methylguanosine-3'-phosphate
  modified_base 8: mod_base = OTHER; note = 2'-O-methyladenosine-3'-phosphate
  modified_base 9: mod_base = OTHER; note = 2'-O-methyladenosine-3'-phosphate
  modified_base 10: mod_base = OTHER; note = 2'-O-methylguanosine-3'-phosphate
  modified_base 11: mod_base = OTHER; note = 2'-O-methyladenosine-3'-phosphate
  modified_base 12: mod_base = OTHER; note = 2'-O-methyluridine-3'-phosphate
  modified_base 13: mod_base = OTHER; note = 2'-O-methylcytidine-3'-phosphate
  modified_base 14: mod_base = OTHER; note = 2'-deoxy-2'-fluorouridine-3'-phosphate
  modified_base 15: mod_base = OTHER; note = 2'-O-methylguanosine-3'-phosphate
  modified_base 16: mod_base = OTHER; note = 2'-deoxy-2'-fluoroadenosine-3'-phosphate
  modified_base 17: mod_base = OTHER; note = 2'-O-methylcytidine-3'-phosphate
  modified_base 18: mod_base = OTHER; note = 2'-O-methylcytidine-3'-phosphate
  modified_base 19: mod_base = OTHER; note = 2'-O-methyladenosine-3'-phosphate
  modified_base 20: mod_base = OTHER; note = 2'-O-methyluridine-3'-phosphate
  modified_base 21: mod_base = OTHER; note = 2'-O-methyluridine-3'-phosphorothioate
  modified_base 22: mod_base = OTHER; note = 2'-O-methylguanosine-3'-phosphorothioate
  modified_base 23: mod_base = OTHER; note = 2'-O-methylguanosine
tattttgaagatctgaccattgg

SEQ ID NO: 205 - RNA, 23 nt, synthetic construct
  source 1..23: mol_type = other RNA
  modified_base 5: mod_base = OTHER; note = 5'-methyluridine-3'-phosphate
  modified_base 8: mod_base = OTHER; note = 5'-methyluridine-3'-phosphate
  modified_base 13: mod_base = OTHER; note = 5'-methyluridine-3'-phosphate
  modified_base 15: mod_base = OTHER; note = 5'-methyluridine-3'-phosphate
  modified_base 16: mod_base = OTHER; note = 5'-methyluridine-3'-phosphate
  modified_base 22: mod_base = OTHER; note = 5'-methyluridine-3'-phosphate
ccaatggtcagatcttcaaaata

SEQ ID NO: 206 - RNA, 21 nt, synthetic construct
  source 1..21: mol_type = other RNA
  modified_base 1: mod_base = OTHER; note = 2'-O-methyladenosine-3'-phosphorothioate
  modified_base 2: mod_base = OTHER; note = 2'-O-methyladenosine-3'-phosphorothioate
  modified_base 3: mod_base = OTHER; note = 2'-O-methyluridine-3'-phosphate
  modified_base 4: mod_base = OTHER; note = 2'-O-methylguanosine-3'-phosphate
  modified_base 5: mod_base = OTHER; note = 2'-O-methylguanosine-3'-phosphate
  modified_base 6: mod_base = OTHER; note = 2'-O-methyluridine-3'-phosphate
  modified_base 7: mod_base = OTHER; note = 2'-deoxy-2'-fluorocytidine-3'-phosphate
  modified_base 8: mod_base = OTHER; note = 2'-O-methyladenosine-3'-phosphate
  modified_base 9: mod_base = OTHER; note = 2'-deoxy-2'-fluoroguanosine-3'-phosphate
  modified_base 10: mod_base = OTHER; note = 2'-deoxy-2'-fluoroadenosine-3'-phosphate
  modified_base 11: mod_base = OTHER; note = 2'-deoxy-2'-fluorouridine-3'-phosphate
  modified_base 12: mod_base = OTHER; note = 2'-O-methylcytidine-3'-phosphate
  modified_base 13: mod_base = OTHER; note = 2'-O-methyluridine-3'-phosphate
  modified_base 14: mod_base = OTHER; note = 2'-O-methyluridine-3'-phosphate
  modified_base 15: mod_base = OTHER; note = 2'-O-methylcytidine-3'-phosphate
  modified_base 16: mod_base = OTHER; note = 2'-O-methyladenosine-3'-phosphate
  modified_base 17: mod_base = OTHER; note = 2'-O-methyladenosine-3'-phosphate
  modified_base 18: mod_base = OTHER; note = 2'-O-methyladenosine-3'-phosphate
  modified_base 19: mod_base = OTHER; note = 2'-O-methyladenosine-3'-phosphate
  modified_base 20: mod_base = OTHER; note = 2'-O-methyluridine-3'-phosphate
  modified_base 21: mod_base = OTHER; note = 2'-O-methyladenosine-3'-phosphate ((2S,4R)-1-[29-[[2-(acetylamino)-2-deoxy-beta-D-galactopyra nosyl]oxy]-14,14-bis[[3-[[3-[[5-[[2-(acetylamino)-2-deoxy-b eta-D-galactopyranosyl]oxy]-1-oxopentyl]amino]propyl]amino] -3-oxopropoxy]methyl]-1,12,19,25-tetraoxo-16-oxa-13,20,24-t riazanonacos-1-yl]-4-hydroxy-2-pyrrolidinyl)methyl ester
aatggtcagatcttcaaaata

SEQ ID NO: 207 - RNA, 23 nt, synthetic construct
  source 1..23: mol_type = other RNA
  modified_base 1: mod_base = OTHER; note = 2'-O-methyluridine-3'-phosphorothioate
  modified_base 2: mod_base = OTHER; note = 2'-deoxy-2'-fluoroadenosine-3'-phosphorothioate
  modified_base 3: mod_base = OTHER; note = 2'-O-methyluridine-3'-phosphate
  modified_base 4: mod_base = OTHER; note = 2'-O-methyluridine-3'-phosphate
  modified_base 5: mod_base = OTHER; note = 2'-O-methyluridine-3'-phosphate
  modified_base 6: mod_base = OTHER; note = 2'-deoxy-2'-fluorouridine-3'-phosphate
  modified_base 7: mod_base = OTHER; note = 2'-O-methylguanosine-3'-phosphate
  modified_base 8: mod_base = OTHER; note = 2'-O-methyladenosine-3'-phosphate
  modified_base 9: mod_base = OTHER; note = 2'-O-methyladenosine-3'-phosphate
  modified_base 10: mod_base = OTHER; note = 2'-O-methylguanosine-3'-phosphate
  modified_base 11: mod_base = OTHER; note = 2'-O-methyladenosine-3'-phosphate
  modified_base 12: mod_base = OTHER; note = 2'-deoxy-2'-fluorouridine-3'-phosphate
  modified_base 13: mod_base = OTHER; note = 2'-O-methylcytidine-3'-phosphate
  modified_base 14: mod_base = OTHER; note = 2'-deoxy-2'-fluorouridine-3'-phosphate
  modified_base 15: mod_base = OTHER; note = 2'-O-methylguanosine-3'-phosphate
  modified_base 16: mod_base = OTHER; note = 2'-deoxy-2'-fluoroadenosine-3'-phosphate
  modified_base 17: mod_base = OTHER; note = 2'-O-methylcytidine-3'-phosphate
  modified_base 18: mod_base = OTHER; note = 2'-O-methylcytidine-3'-phosphate
  modified_base 19: mod_base = OTHER; note = 2'-O-methyladenosine-3'-phosphate
  modified_base 20: mod_base = OTHER; note = 2'-O-methyluridine-3'-phosphate
  modified_base 21: mod_base = OTHER; note = 2'-O-methyluridine-3'-phosphorothioate
  modified_base 22: mod_base = OTHER; note = 2'-O-methylguanosine-3'-phosphorothioate
  modified_base 23: mod_base = OTHER; note = 2'-O-methylguanosine
tattttgaagatctgaccattgg

SEQ ID NO: 208 - RNA, 23 nt, synthetic construct
  source 1..23: mol_type = other RNA
  modified_base 5: mod_base = OTHER; note = 5'-methyluridine-3'-phosphate
  modified_base 8: mod_base = OTHER; note = 5'-methyluridine-3'-phosphate
  modified_base 13: mod_base = OTHER; note = 5'-methyluridine-3'-phosphate
  modified_base 15: mod_base = OTHER; note = 5'-methyluridine-3'-phosphate
  modified_base 16: mod_base = OTHER; note = 5'-methyluridine-3'-phosphate
  modified_base 22: mod_base = OTHER; note = 5'-methyluridine-3'-phosphate
ccaatggtcagatcttcaaaata

SEQ ID NO: 209 - RNA, 21 nt, synthetic construct
  source 1..21: mol_type = other RNA
  modified_base 1: mod_base = OTHER; note = 2'-O-methyladenosine-3'-phosphorothioate
  modified_base 2: mod_base = OTHER; note = 2'-O-methyladenosine-3'-phosphorothioate
  modified_base 3: mod_base = OTHER; note = 2'-O-methyluridine-3'-phosphate
  modified_base 4: mod_base = OTHER; note = 2'-O-methylguanosine-3'-phosphate
  modified_base 5: mod_base = OTHER; note = 2'-O-methylguanosine-3'-phosphate
  modified_base 6: mod_base = OTHER; note = 2'-O-methyluridine-3'-phosphate
  modified_base 7: mod_base = OTHER; note = 2'-O-methylcytidine-3'-phosphate
  modified_base 8: mod_base = OTHER; note = 2'-O-methyladenosine-3'-phosphate
  modified_base 9: mod_base = OTHER; note = 2'-deoxy-2'-fluoroguanosine-3'-phosphate
  modified_base 10: mod_base = OTHER; note = 2'-deoxy-2'-fluoroadenosine-3'-phosphate
  modified_base 11: mod_base = OTHER; note = 2'-deoxy-2'-fluorouridine-3'-phosphate
  modified_base 12: mod_base = OTHER; note = 2'-O-methylcytidine-3'-phosphate
  modified_base 13: mod_base = OTHER; note = 2'-O-methyluridine-3'-phosphate
  modified_base 14: mod_base = OTHER; note = 2'-O-methyluridine-3'-phosphate
  modified_base 15: mod_base = OTHER; note = 2'-O-methylcytidine-3'-phosphate
  modified_base 16: mod_base = OTHER; note = 2'-O-methyladenosine-3'-phosphate
  modified_base 17: mod_base = OTHER; note = 2'-O-methyladenosine-3'-phosphate
  modified_base 18: mod_base = OTHER; note = 2'-O-methyladenosine-3'-phosphate
  modified_base 19: mod_base = OTHER; note = 2'-O-methyladenosine-3'-phosphate
  modified_base 20: mod_base = OTHER; note = 2'-O-methyluridine-3'-phosphate
  modified_base 21: mod_base = OTHER; note = 2'-O-methyladenosine-3'-phosphate ((2S,4R)-1-[29-[[2-(acetylamino)-2-deoxy-beta-D-galactopyra nosyl]oxy]-14,14-bis[[3-[[3-[[5-[[2-(acetylamino)-2-deoxy-b eta-D-galactopyranosyl]oxy]-1-oxopentyl]amino]propyl]amino] -3-oxopropoxy]methyl]-1,12,19,25-tetraoxo-16-oxa-13,20,24-t riazanonacos-1-yl]-4-hydroxy-2-pyrrolidinyl)methyl ester
aatggtcagatcttcaaaata

SEQ ID NO: 210 - RNA, 23 nt, synthetic construct
  source 1..23: mol_type = other RNA
  modified_base 1: mod_base = OTHER; note = 2'-O-methyluridine-3'-phosphorothioate
  modified_base 2: mod_base = OTHER; note = 2'-deoxy-2'-fluoroadenosine-3'-phosphorothioate
  modified_base 3: mod_base = OTHER; note = 2'-O-methyluridine-3'-phosphate
  modified_base 4: mod_base = OTHER; note = 2'-O-methyluridine-3'-phosphate
  modified_base 5: mod_base = OTHER; note = 2'-O-methyluridine-3'-phosphate
  modified_base 6: mod_base = OTHER; note = 2'-deoxy-2'-fluorouridine-3'-phosphate
  modified_base 7: mod_base = OTHER; note = 2'-O-methylguanosine-3'-phosphate
  modified_base 8: mod_base = OTHER; note = 2'-deoxy-2'-fluoroadenosine-3'-phosphate
  modified_base 9: mod_base = OTHER; note = 2'-deoxy-2'-fluoroadenosine-3'-phosphate
  modified_base 10: mod_base = OTHER; note = 2'-O-methylguanosine-3'-phosphate
  modified_base 11: mod_base = OTHER; note = 2'-O-methyladenosine-3'-phosphate
  modified_base 12: mod_base = OTHER; note = 2'-deoxy-2'-fluorouridine-3'-phosphate
  modified_base 13: mod_base = OTHER; note = 2'-O-methylcytidine-3'-phosphate
  modified_base 14: mod_base = OTHER; note = 2'-deoxy-2'-fluorouridine-3'-phosphate
  modified_base 15: mod_base = OTHER; note = 2'-O-methylguanosine-3'-phosphate
  modified_base 16: mod_base = OTHER; note = 2'-deoxy-2'-fluoroadenosine-3'-phosphate
  modified_base 17: mod_base = OTHER; note = 2'-O-methylcytidine-3'-phosphate
  modified_base 18: mod_base = OTHER; note = 2'-O-methylcytidine-3'-phosphate
  modified_base 19: mod_base = OTHER; note = 2'-O-methyladenosine-3'-phosphate
  modified_base 20: mod_base = OTHER; note = 2'-O-methyluridine-3'-phosphate
  modified_base 21: mod_base = OTHER; note = 2'-O-methyluridine-3'-phosphorothioate
  modified_base 22: mod_base = OTHER; note = 2'-O-methylguanosine-3'-phosphorothioate
  modified_base 23: mod_base = OTHER; note = 2'-O-methylguanosine
tattttgaagatctgaccattgg

SEQ ID NO: 211 - RNA, 23 nt, synthetic construct
  source 1..23: mol_type = other RNA
  modified_base 5: mod_base = OTHER; note = 5'-methyluridine-3'-phosphate
  modified_base 8: mod_base = OTHER; note = 5'-methyluridine-3'-phosphate
  modified_base 13: mod_base = OTHER; note = 5'-methyluridine-3'-phosphate
  modified_base 15: mod_base = OTHER; note = 5'-methyluridine-3'-phosphate
  modified_base 16: mod_base = OTHER; note = 5'-methyluridine-3'-phosphate
  modified_base 22: mod_base = OTHER; note = 5'-methyluridine-3'-phosphate
ccaatggtcagatcttcaaaata

SEQ ID NO: 212 - RNA, 21 nt, synthetic construct
  source 1..21: mol_type = other RNA
  modified_base 1: mod_base = OTHER; note = 2'-O-methyladenosine-3'-phosphorothioate
  modified_base 2: mod_base = OTHER; note = 2'-O-methyladenosine-3'-phosphorothioate
  modified_base 3: mod_base = OTHER; note = 2'-O-methyluridine-3'-phosphate
  modified_base 4: mod_base = OTHER; note = 2'-O-methylguanosine-3'-phosphate
  modified_base 5: mod_base = OTHER; note = 2'-O-methylguanosine-3'-phosphate
  modified_base 6: mod_base = OTHER; note = 2'-O-methyluridine-3'-phosphate
  modified_base 7: mod_base = OTHER; note = 2'-O-methylcytidine-3'-phosphate
  modified_base 8: mod_base = OTHER; note = 2'-O-methyladenosine-3'-phosphate
  modified_base 9: mod_base = OTHER; note = 2'-deoxy-2'-fluoroguanosine-3'-phosphate
  modified_base 10: mod_base = OTHER; note = 2'-deoxy-2'-fluoroadenosine-3'-phosphate
  modified_base 11: mod_base = OTHER; note = 2'-deoxy-2'-fluorouridine-3'-phosphate
  modified_base 12: mod_base = OTHER; note = 2'-O-methylcytidine-3'-phosphate
  modified_base 13: mod_base = OTHER; note = 2'-O-methyluridine-3'-phosphate
  modified_base 14: mod_base = OTHER; note = 2'-O-methyluridine-3'-phosphate
  modified_base 15: mod_base = OTHER; note = 2'-O-methylcytidine-3'-phosphate
  modified_base 16: mod_base = OTHER; note = 2'-O-methyladenosine-3'-phosphate
  modified_base 17: mod_base = OTHER; note = 2'-O-methyladenosine-3'-phosphate
  modified_base 18: mod_base = OTHER; note = 2'-O-methyladenosine-3'-phosphate
  modified_base 19: mod_base = OTHER; note = 2'-O-methyladenosine-3'-phosphate
  modified_base 20: mod_base = OTHER; note = 2'-O-methyluridine-3'-phosphate
  modified_base 21: mod_base = OTHER; note = 2'-O-methyladenosine-3'-phosphate ((2S,4R)-1-[29-[[2-(acetylamino)-2-deoxy-beta-D-galactopyra nosyl]oxy]-14,14-bis[[3-[[3-[[5-[[2-(acetylamino)-2-deoxy-b eta-D-galactopyranosyl]oxy]-1-oxopentyl]amino]propyl]amino] -3-oxopropoxy]methyl]-1,12,19,25-tetraoxo-16-oxa-13,20,24-t riazanonacos-1-yl]-4-hydroxy-2-pyrrolidinyl)methyl ester
aatggtcagatcttcaaaata

SEQ ID NO: 213 - RNA, 23 nt, synthetic construct
  source 1..23: mol_type = other RNA
  modified_base 1: mod_base = OTHER; note = 2'-O-methyluridine-3'-phosphorothioate
  modified_base 2: mod_base = OTHER; note = 2'-deoxy-2'-fluoroadenosine-3'-phosphorothioate
  modified_base 3: mod_base = OTHER; note = 2'-O-methyluridine-3'-phosphate
  modified_base 4: mod_base = OTHER; note = 2'-O-methyluridine-3'-phosphate
  modified_base 5: mod_base = OTHER; note = 2'-O-methyluridine-3'-phosphate
  modified_base 6: mod_base = OTHER; note = 2'-deoxy-2'-fluorouridine-3'-phosphate
  modified_base 7: mod_base = OTHER; note = 2'-O-methylguanosine-3'-phosphate
  modified_base 8: mod_base = OTHER; note = 2'-O-methyladenosine-3'-phosphate
  modified_base 9: mod_base = OTHER; note = 2'-O-methyladenosine-3'-phosphate
  modified_base 10: mod_base = OTHER; note = 2'-O-methylguanosine-3'-phosphate
  modified_base 11: mod_base = OTHER; note = 2'-O-methyladenosine-3'-phosphate
  modified_base 12: mod_base = OTHER; note = 2'-deoxy-2'-fluorouridine-3'-phosphate
  modified_base 13: mod_base = OTHER; note = 2'-O-methylcytidine-3'-phosphate
  modified_base 14: mod_base = OTHER; note = 2'-deoxy-2'-fluorouridine-3'-phosphate
  modified_base 15: mod_base = OTHER; note = 2'-O-methylguanosine-3'-phosphate
  modified_base 16: mod_base = OTHER; note = 2'-deoxy-2'-fluoroadenosine-3'-phosphate
  modified_base 17: mod_base = OTHER; note = 2'-O-methylcytidine-3'-phosphate
  modified_base 18: mod_base = OTHER; note = 2'-O-methylcytidine-3'-phosphate
  modified_base 19: mod_base = OTHER; note = 2'-O-methyladenosine-3'-phosphate
  modified_base 20: mod_base = OTHER; note = 2'-O-methyluridine-3'-phosphate
  modified_base 21: mod_base = OTHER; note = 2'-O-methyluridine-3'-phosphorothioate
  modified_base 22: mod_base = OTHER; note = 2'-O-methylguanosine-3'-phosphorothioate
  modified_base 23: mod_base = OTHER; note = 2'-O-methylguanosine
tattttgaagatctgaccattgg

SEQ ID NO: 214 - RNA, 23 nt, synthetic construct
  source 1..23: mol_type = other RNA
  modified_base 5: mod_base = OTHER; note = 5'-methyluridine-3'-phosphate
  modified_base 8: mod_base = OTHER; note = 5'-methyluridine-3'-phosphate
  modified_base 13: mod_base = OTHER; note = 5'-methyluridine-3'-phosphate
  modified_base 15: mod_base = OTHER; note = 5'-methyluridine-3'-phosphate
  modified_base 16: mod_base = OTHER; note = 5'-methyluridine-3'-phosphate
  modified_base 22: mod_base = OTHER; note = 5'-methyluridine-3'-phosphate
ccaatggtcagatcttcaaaata

SEQ ID NO: 215 - skipped

SEQ ID NO: 216 - RNA, 21 nt, synthetic construct
  source 1..21: mol_type = other RNA
  modified_base 1: mod_base = OTHER; note = 2'-O-methyladenosine-3'-phosphorothioate
  modified_base 2: mod_base = OTHER; note = 2'-O-methyladenosine-3'-phosphorothioate
  modified_base 3: mod_base = OTHER; note = 2'-O-methyluridine-3'-phosphate
  modified_base 4: mod_base = OTHER; note = 2'-O-methylguanosine-3'-phosphate
  modified_base 5: mod_base = OTHER; note = 2'-O-methylguanosine-3'-phosphate
  modified_base 6: mod_base = OTHER; note = 2'-O-methyluridine-3'-phosphate
  modified_base 7: mod_base = OTHER; note = 2'-O-methylcytidine-3'-phosphate
  modified_base 8: mod_base = OTHER; note = 2'-O-methyladenosine-3'-phosphate
  modified_base 9: mod_base = OTHER; note = 2'-O-methylguanosine-3'-phosphate
  modified_base 10: mod_base = OTHER; note = 2'-deoxy-2'-fluoroadenosine-3'-phosphate
  modified_base 11: mod_base = OTHER; note = 2'-deoxy-2'-fluorouridine-3'-phosphate
  modified_base 12: mod_base = OTHER; note = 2'-O-methylcytidine-3'-phosphate
  modified_base 13: mod_base = OTHER; note = 2'-O-methyluridine-3'-phosphate
  modified_base 14: mod_base = OTHER; note = 2'-O-methyluridine-3'-phosphate
  modified_base 15: mod_base = OTHER; note = 2'-O-methylcytidine-3'-phosphate
  modified_base 16: mod_base = OTHER; note = 2'-O-methyladenosine-3'-phosphate
  modified_base 17: mod_base = OTHER; note = 2'-O-methyladenosine-3'-phosphate
  modified_base 18: mod_base = OTHER; note = 2'-O-methyladenosine-3'-phosphate
  modified_base 19: mod_base = OTHER; note = 2'-O-methyladenosine-3'-phosphate
  modified_base 20: mod_base = OTHER; note = 2'-O-methyluridine-3'-phosphate
  modified_base 21: mod_base = OTHER; note = 2'-O-methyladenosine-3'-phosphate ((2S,4R)-1-[29-[[2-(acetylamino)-2-deoxy-beta-D-galactopyra nosyl]oxy]-14,14-bis[[3-[[3-[[5-[[2-(acetylamino)-2-deoxy-b eta-D-galactopyranosyl]oxy]-1-oxopentyl]amino]propyl]amino] -3-oxopropoxy]methyl]-1,12,19,25-tetraoxo-16-oxa-13,20,24-t riazanonacos-1-yl]-4-hydroxy-2-pyrrolidinyl)methyl ester
aatggtcagatcttcaaaata

SEQ ID NO: 217 - RNA, 23 nt, synthetic construct
  source 1..23: mol_type = other RNA
  modified_base 1: mod_base = OTHER; note = 2'-O-methyluridine-3'-phosphorothioate
  modified_base 2: mod_base = OTHER; note = 2'-deoxy-2'-fluoroadenosine-3'-phosphorothioate
  modified_base 3: mod_base = OTHER; note = 2'-O-methyluridine-3'-phosphate
  modified_base 4: mod_base = OTHER; note = 2'-O-methyluridine-3'-phosphate
  modified_base 5: mod_base = OTHER; note = 2'-O-methyluridine-3'-phosphate
  modified_base 6: mod_base = OTHER; note = 2'-deoxy-2'-fluorouridine-3'-phosphate
  modified_base 7: mod_base = OTHER; note = 2'-O-methylguanosine-3'-phosphate
  modified_base 8: mod_base = OTHER; note = 2'-deoxy-2'-fluoroadenosine-3'-phosphate
  modified_base 9: mod_base = OTHER; note = 2'-deoxy-2'-fluoroadenosine-3'-phosphate
  modified_base 10: mod_base = OTHER; note = 2'-O-methylguanosine-3'-phosphate
  modified_base 11: mod_base = OTHER; note = 2'-O-methyladenosine-3'-phosphate
  modified_base 12: mod_base = OTHER; note = 2'-deoxy-2'-fluorouridine-3'-phosphate
  modified_base 13: mod_base = OTHER; note = 2'-O-methylcytidine-3'-phosphate
  modified_base 14: mod_base = OTHER; note = 2'-deoxy-2'-fluorouridine-3'-phosphate
  modified_base 15: mod_base = OTHER; note = 2'-O-methylguanosine-3'-phosphate
  modified_base 16: mod_base = OTHER; note = 2'-deoxy-2'-fluoroadenosine-3'-phosphate
  modified_base 17: mod_base = OTHER; note = 2'-O-methylcytidine-3'-phosphate
  modified_base 18: mod_base = OTHER; note = 2'-O-methylcytidine-3'-phosphate
  modified_base 19: mod_base = OTHER; note = 2'-O-methyladenosine-3'-phosphate
  modified_base 20: mod_base = OTHER; note = 2'-O-methyluridine-3'-phosphate
  modified_base 21: mod_base = OTHER; note = 2'-O-methyluridine-3'-phosphorothioate
  modified_base 22: mod_base = OTHER; note = 2'-O-methylguanosine-3'-phosphorothioate
  modified_base 23: mod_base = OTHER; note = 2'-O-methylguanosine
tattttgaagatctgaccattgg

SEQ ID NO: 218 - RNA, 23 nt, synthetic construct
  source 1..23: mol_type = other RNA
  modified_base 5: mod_base = OTHER; note = 5'-methyluridine-3'-phosphate
  modified_base 8: mod_base = OTHER; note = 5'-methyluridine-3'-phosphate
  modified_base 13: mod_base = OTHER; note = 5'-methyluridine-3'-phosphate
  modified_base 15: mod_base = OTHER; note = 5'-methyluridine-3'-phosphate
  modified_base 16: mod_base = OTHER; note = 5'-methyluridine-3'-phosphate
  modified_base 22: mod_base = OTHER; note = 5'-methyluridine-3'-phosphate
ccaatggtcagatcttcaaaata

SEQ ID NO: 219 - RNA, 21 nt, synthetic construct
  source 1..21: mol_type = other RNA
  modified_base 1: mod_base = OTHER; note = 2'-O-methyladenosine-3'-phosphorothioate
  modified_base 2: mod_base = OTHER; note = 2'-O-methyladenosine-3'-phosphorothioate
  modified_base 3: mod_base = OTHER; note = 2'-O-methyluridine-3'-phosphate
  modified_base 4: mod_base = OTHER; note = 2'-O-methylguanosine-3'-phosphate
  modified_base 5: mod_base = OTHER; note = 2'-O-methylguanosine-3'-phosphate
  modified_base 6: mod_base = OTHER; note = 2'-O-methyluridine-3'-phosphate
  modified_base 7: mod_base = OTHER; note = 2'-O-methylcytidine-3'-phosphate
  modified_base 8: mod_base = OTHER; note = 2'-O-methyladenosine-3'-phosphate
  modified_base 9: mod_base = OTHER; note = 2'-O-methylguanosine-3'-phosphate
  modified_base 10: mod_base = OTHER; note = 2'-deoxy-2'-fluoroadenosine-3'-phosphate
  modified_base 11: mod_base = OTHER; note = 2'-deoxy-2'-fluorouridine-3'-phosphate
  modified_base 12: mod_base = OTHER; note = 2'-O-methylcytidine-3'-phosphate
  modified_base 13: mod_base = OTHER; note = 2'-O-methyluridine-3'-phosphate
  modified_base 14: mod_base = OTHER; note = 2'-O-methyluridine-3'-phosphate
  modified_base 15: mod_base = OTHER; note = 2'-O-methylcytidine-3'-phosphate
  modified_base 16: mod_base = OTHER; note = 2'-O-methyladenosine-3'-phosphate
  modified_base 17: mod_base = OTHER; note = 2'-O-methyladenosine-3'-phosphate
  modified_base 18: mod_base = OTHER; note = 2'-O-methyladenosine-3'-phosphate
  modified_base 19: mod_base = OTHER; note = 2'-O-methyladenosine-3'-phosphate
  modified_base 20: mod_base = OTHER; note = 2'-O-methyluridine-3'-phosphate
  modified_base 21: mod_base = OTHER; note = 2'-O-methyladenosine-3'-phosphate ((2S,4R)-1-[29-[[2-(acetylamino)-2-deoxy-beta-D-galactopyra nosyl]oxy]-14,14-bis[[3-[[3-[[5-[[2-(acetylamino)-2-deoxy-b eta-D-galactopyranosyl]oxy]-1-oxopentyl]amino]propyl]amino] -3-oxopropoxy]methyl]-1,12,19,25-tetraoxo-16-oxa-13,20,24-t riazanonacos-1-yl]-4-hydroxy-2-pyrrolidinyl)methyl ester
aatggtcagatcttcaaaata

SEQ ID NO: 220 - RNA, 23 nt, synthetic construct
  source 1..23: mol_type = other RNA
  modified_base 1: mod_base = OTHER; note = 2'-O-methyluridine-3'-phosphorothioate
  modified_base 2: mod_base = OTHER; note = 2'-deoxy-2'-fluoroadenosine-3'-phosphorothioate
  modified_base 3: mod_base = OTHER; note = 2'-O-methyluridine-3'-phosphate
  modified_base 4: mod_base = OTHER; note = 2'-O-methyluridine-3'-phosphate
  modified_base 5: mod_base = OTHER; note = 2'-O-methyluridine-3'-phosphate
  modified_base 6: mod_base = OTHER; note = 2'-deoxy-2'-fluorouridine-3'-phosphate
  modified_base 7: mod_base = OTHER; note = 2'-O-methylguanosine-3'-phosphate
  modified_base 8: mod_base = OTHER; note = 2'-O-methyladenosine-3'-phosphate
  modified_base 9: mod_base = OTHER; note = 2'-O-methyladenosine-3'-phosphate
  modified_base 10: mod_base = OTHER; note = 2'-O-methylguanosine-3'-phosphate
  modified_base 11: mod_base = OTHER; note = 2'-O-methyladenosine-3'-phosphate
  modified_base 12: mod_base = OTHER; note = 2'-deoxy-2'-fluorouridine-3'-phosphate
  modified_base 13: mod_base = OTHER; note = 2'-O-methylcytidine-3'-phosphate
  modified_base 14: mod_base = OTHER; note = 2'-deoxy-2'-fluorouridine-3'-phosphate
  modified_base 15: mod_base = OTHER; note = 2'-O-methylguanosine-3'-phosphate
  modified_base 16: mod_base = OTHER; note = 2'-deoxy-2'-fluoroadenosine-3'-phosphate
  modified_base 17: mod_base = OTHER; note = 2'-O-methylcytidine-3'-phosphate
  modified_base 18: mod_base = OTHER; note = 2'-O-methylcytidine-3'-phosphate
  modified_base 19: mod_base = OTHER; note = 2'-O-methyladenosine-3'-phosphate
  modified_base 20: mod_base = OTHER; note = 2'-O-methyluridine-3'-phosphate
  modified_base 21: mod_base = OTHER; note = 2'-O-methyluridine-3'-phosphorothioate
  modified_base 22: mod_base = OTHER; note = 2'-O-methylguanosine-3'-phosphorothioate
  modified_base 23: mod_base = OTHER; note = 2'-O-methylguanosine
tattttgaagatctgaccattgg

SEQ ID NO: 221 - RNA, 23 nt, synthetic construct
  source 1..23: mol_type = other RNA
  modified_base 5: mod_base = OTHER; note = 5'-methyluridine-3'-phosphate
  modified_base 8: mod_base = OTHER; note = 5'-methyluridine-3'-phosphate
  modified_base 13: mod_base = OTHER; note = 5'-methyluridine-3'-phosphate
  modified_base 15: mod_base = OTHER; note = 5'-methyluridine-3'-phosphate
  modified_base 16: mod_base = OTHER; note = 5'-methyluridine-3'-phosphate
  modified_base 22: mod_base = OTHER; note = 5'-methyluridine-3'-phosphate
ccaatggtcagatcttcaaaata

SEQ ID NO: 222 - RNA, 21 nt, synthetic construct
  source 1..21: mol_type = other RNA
  modified_base 1: mod_base = OTHER; note = 2'-O-methyladenosine-3'-phosphorothioate
  modified_base 2: mod_base = OTHER; note = 2'-O-methyladenosine-3'-phosphorothioate
  modified_base 3: mod_base = OTHER; note = 2'-O-methyluridine-3'-phosphate
  modified_base 4: mod_base = OTHER; note = 2'-O-methylguanosine-3'-phosphate
  modified_base 5: mod_base = OTHER; note = 2'-O-methylguanosine-3'-phosphate
  modified_base 6: mod_base = OTHER; note = 2'-O-methyluridine-3'-phosphate
  modified_base 7: mod_base = OTHER; note = 2'-deoxy-2'-fluorocytidine-3'-phosphate
  modified_base 8: mod_base = OTHER; note = 2'-O-methyladenosine-3'-phosphate
  modified_base 9: mod_base = OTHER; note = 2'-deoxy-2'-fluoroguanosine-3'-phosphate
  modified_base 10: mod_base = OTHER; note = 2'-deoxy-2'-fluoroadenosine-3'-phosphate
  modified_base 11: mod_base = OTHER; note = 2'-deoxy-2'-fluorouridine-3'-phosphate
  modified_base 12: mod_base = OTHER; note = 2'-O-methylcytidine-3'-phosphate
  modified_base 13: mod_base = OTHER; note = 2'-O-methyluridine-3'-phosphate
  modified_base 14: mod_base = OTHER; note = 2'-O-methyluridine-3'-phosphate
  modified_base 15: mod_base = OTHER; note = 2'-O-methylcytidine-3'-phosphate
  modified_base 16: mod_base = OTHER; note = 2'-O-methyladenosine-3'-phosphate
  modified_base 17: mod_base = OTHER; note = 2'-O-methyladenosine-3'-phosphate
  modified_base 18: mod_base = OTHER; note = 2'-O-methyladenosine-3'-phosphate
  modified_base 19: mod_base = OTHER; note = 2'-O-methyladenosine-3'-phosphate
  modified_base 20: mod_base = OTHER; note = 2'-O-methyluridine-3'-phosphate
  modified_base 21: mod_base = OTHER; note = 2'-O-methyladenosine-3'-phosphate ((2S,4R)-1-[29-[[2-(acetylamino)-2-deoxy-beta-D-galactopyra nosyl]oxy]-14,14-bis[[3-[[3-[[5-[[2-(acetylamino)-2-deoxy-b eta-D-galactopyranosyl]oxy]-1-oxopentyl]amino]propyl]amino] -3-oxopropoxy]methyl]-1,12,19,25-tetraoxo-16-oxa-13,20,24-t riazanonacos-1-yl]-4-hydroxy-2-pyrrolidinyl)methyl ester
aatggtcagatcttcaaaata

SEQ ID NO: 223 - RNA, 23 nt, synthetic construct
  source 1..23: mol_type = other RNA
  modified_base 1: mod_base = OTHER; note = 2'-O-methyluridine-3'-phosphorothioate
  modified_base 2: mod_base = OTHER; note = 2'-deoxy-2'-fluoroadenosine-3'-phosphorothioate
  modified_base 3: mod_base = OTHER; note = 2'-O-methyluridine-3'-phosphate
  modified_base 4: mod_base = OTHER; note = 2'-O-methyluridine-3'-phosphate
  modified_base 5: mod_base = OTHER; note = 2'-O-methyluridine-3'-phosphate
  modified_base 6: mod_base = OTHER; note = 2'-deoxy-2'-fluorouridine-3'-phosphate
  modified_base 7: mod_base = OTHER; note = 2'-O-methylguanosine-3'-phosphate
  modified_base 8: mod_base = OTHER; note = 2'-O-methyladenosine-3'-phosphate
  modified_base 9: mod_base = OTHER; note = 2'-O-methyladenosine-3'-phosphate
  modified_base 10: mod_base = OTHER; note = 2'-O-methylguanosine-3'-phosphate
  modified_base 11: mod_base = OTHER; note = 2'-O-methyladenosine-3'-phosphate
  modified_base 12: mod_base = OTHER; note = 2'-deoxy-2'-fluorouridine-3'-phosphate
  modified_base 13: mod_base = OTHER; note = 2'-O-methylcytidine-3'-phosphate
  modified_base 14: mod_base = OTHER; note = 2'-deoxy-2'-fluorouridine-3'-phosphate
  modified_base 15: mod_base = OTHER; note = 2'-O-methylguanosine-3'-phosphate
  modified_base 16: mod_base = OTHER; note = 2'-deoxy-2'-fluoroadenosine-3'-phosphate
  modified_base 17: mod_base = OTHER; note = 2'-O-methylcytidine-3'-phosphate
  modified_base 18: mod_base = OTHER; note = 2'-O-methylcytidine-3'-phosphate
  modified_base 19: mod_base = OTHER; note = 2'-O-methyladenosine-3'-phosphate
  modified_base 20: mod_base = OTHER; note = 2'-O-methyluridine-3'-phosphate
  modified_base 21: mod_base = OTHER; note = 2'-O-methyluridine-3'-phosphorothioate
  modified_base 22: mod_base = OTHER; note = 2'-O-methylguanosine-3'-phosphorothioate
  modified_base 23: mod_base = OTHER; note = 2'-O-methyluridine
tattttgaagatctgaccattgt

SEQ ID NO: 224 - RNA, 23 nt, synthetic construct
  source 1..23: mol_type = other RNA
  modified_base 5: mod_base = OTHER; note = 5'-methyluridine-3'-phosphate
  modified_base 8: mod_base = OTHER; note = 5'-methyluridine-3'-phosphate
  modified_base 13: mod_base = OTHER; note = 5'-methyluridine-3'-phosphate
  modified_base 15: mod_base = OTHER; note = 5'-methyluridine-3'-phosphate
  modified_base 16: mod_base = OTHER; note = 5'-methyluridine-3'-phosphate
  modified_base 22: mod_base = OTHER; note = 5'-methyluridine-3'-phosphate
acaatggtcagatcttcaaaata

SEQ ID NO: 225 - RNA, 21 nt, synthetic construct
  source 1..21: mol_type = other RNA
  modified_base 1: mod_base = OTHER; note = 2'-O-methyladenosine-3'-phosphorothioate
  modified_base 2: mod_base = OTHER; note = 2'-O-methyladenosine-3'-phosphorothioate
  modified_base 3: mod_base = OTHER; note = 2'-O-methyluridine-3'-phosphate
  modified_base 4: mod_base = OTHER; note = 2'-O-methylguanosine-3'-phosphate
  modified_base 5: mod_base = OTHER; note = 2'-O-methylguanosine-3'-phosphate
  modified_base 6: mod_base = OTHER; note = 2'-O-methyluridine-3'-phosphate
  modified_base 7: mod_base = OTHER; note = 2'-deoxy-2'-fluorocytidine-3'-phosphate
  modified_base 8: mod_base = OTHER; note = 2'-O-methyladenosine-3'-phosphate
  modified_base 9: mod_base = OTHER; note = 2'-deoxy-2'-fluoroguanosine-3'-phosphate
  modified_base 10: mod_base = OTHER; note = 2'-deoxy-2'-fluoroadenosine-3'-phosphate
  modified_base 11: mod_base = OTHER; note = 2'-deoxy-2'-fluorouridine-3'-phosphate
  modified_base 12: mod_base = OTHER; note = 2'-O-methylcytidine-3'-phosphate
  modified_base 13: mod_base = OTHER; note = 2'-O-methyluridine-3'-phosphate
  modified_base 14: mod_base = OTHER; note = 2'-O-methyluridine-3'-phosphate
  modified_base 15: mod_base = OTHER; note = 2'-O-methylcytidine-3'-phosphate
  modified_base 16: mod_base = OTHER; note = 2'-O-methyladenosine-3'-phosphate
  modified_base 17: mod_base = OTHER; note = 2'-O-methyladenosine-3'-phosphate
  modified_base 18: mod_base = OTHER; note = 2'-O-methyladenosine-3'-phosphate
  modified_base 19: mod_base = OTHER; note = 2'-O-methyladenosine-3'-phosphate
  modified_base 20: mod_base = OTHER; note = 2'-O-methyluridine-3'-phosphate
  modified_base 21: mod_base = OTHER; note = 2'-O-methyladenosine-3'-phosphate ((2S,4R)-1-[29-[[2-(acetylamino)-2-deoxy-beta-D-galactopyra nosyl]oxy]-14,14-bis[[3-[[3-[[5-[[2-(acetylamino)-2-deoxy-b eta-D-galactopyranosyl]oxy]-1-oxopentyl]amino]propyl]amino] -3-oxopropoxy]methyl]-1,12,19,25-tetraoxo-16-oxa-13,20,24-t riazanonacos-1-yl]-4-hydroxy-2-pyrrolidinyl)methyl ester
aatggtcagatcttcaaaata

SEQ ID NO: 226 - RNA, 23 nt, synthetic construct
  source 1..23: mol_type = other RNA
  modified_base 1: mod_base = OTHER; note = 2'-O-methyluridine-3'-phosphorothioate
  modified_base 2: mod_base = OTHER; note = 2'-deoxy-2'-fluoroadenosine-3'-phosphorothioate
  modified_base 3: mod_base = OTHER; note = 2'-O-methyluridine-3'-phosphate
  modified_base 4: mod_base = OTHER; note = 2'-O-methyluridine-3'-phosphate
  modified_base 5: mod_base = OTHER; note = 2'-O-methyluridine-3'-phosphate
  modified_base 6: mod_base = OTHER; note = 2'-deoxy-2'-fluorouridine-3'-phosphate
  modified_base 7: mod_base = OTHER; note = 2'-O-methylguanosine-3'-phosphate
  modified_base 8: mod_base = OTHER; note = 2'-O-methyladenosine-3'-phosphate
  modified_base 9: mod_base = OTHER; note = 2'-O-methyladenosine-3'-phosphate
  modified_base 10: mod_base = OTHER; note = 2'-O-methylguanosine-3'-phosphate
  modified_base 11: mod_base = OTHER; note = 2'-O-methyladenosine-3'-phosphate
  modified_base 12: mod_base = OTHER; note = 2'-deoxy-2'-fluorouridine-3'-phosphate
  modified_base 13: mod_base = OTHER; note = 2'-O-methylcytidine-3'-phosphate
  modified_base 14: mod_base = OTHER; note = 2'-deoxy-2'-fluorouridine-3'-phosphate
  modified_base 15: mod_base = OTHER; note = 2'-O-methylguanosine-3'-phosphate
  modified_base 16: mod_base = OTHER; note = 2'-deoxy-2'-fluoroadenosine-3'-phosphate
  modified_base 17: mod_base = OTHER; note = 2'-O-methylcytidine-3'-phosphate
  modified_base 18: mod_base = OTHER; note = 2'-O-methylcytidine-3'-phosphate
  modified_base 19: mod_base = OTHER; note = 2'-O-methyladenosine-3'-phosphate
  modified_base 20: mod_base = OTHER; note = 2'-O-methyluridine-3'-phosphate
  modified_base 21: mod_base = OTHER; note = 2'-O-methyluridine-3'-phosphorothioate
  modified_base 22: mod_base = OTHER; note = 2'-O-methylcytidine-3'-phosphorothioate
  modified_base 23: mod_base = OTHER; note = 2'-O-methyluridine
tattttgaagatctgaccattct

SEQ ID NO: 227 - RNA, 23 nt, synthetic construct
  source 1..23: mol_type = other RNA
  modified_base 5: mod_base = OTHER; note = 5'-methyluridine-3'-phosphate
  modified_base 8: mod_base = OTHER; note = 5'-methyluridine-3'-phosphate
  modified_base 13: mod_base = OTHER; note = 5'-methyluridine-3'-phosphate
  modified_base 15: mod_base = OTHER; note = 5'-methyluridine-3'-phosphate
  modified_base 16: mod_base = OTHER; note = 5'-methyluridine-3'-phosphate
  modified_base 22: mod_base = OTHER; note = 5'-methyluridine-3'-phosphate
agaatggtcagatcttcaaaata

SEQ ID NO: 228 - RNA, 19 nt, synthetic construct
  source 1..19: mol_type = other RNA
  modified_base 1: mod_base = OTHER; note = 2'-O-methyluridine-3'-phosphorothioate
  modified_base 2: mod_base = OTHER; note = 2'-O-methylguanosine-3'-phosphorothioate
  modified_base 3: mod_base = OTHER; note = 2'-O-methylguanosine-3'-phosphate
  modified_base 4: mod_base = OTHER; note = 2'-O-methyluridine-3'-phosphate
  modified_base 5: mod_base = OTHER; note = 2'-deoxy-2'-fluorocytidine-3'-phosphate
  modified_base 6: mod_base = OTHER; note = 2'-O-methyladenosine-3'-phosphate
  modified_base 7: mod_base = OTHER; note = 2'-deoxy-2'-fluoroguanosine-3'-phosphate
  modified_base 8: mod_base = OTHER; note = 2'-deoxy-2'-fluoroadenosine-3'-phosphate
  modified_base 9: mod_base = OTHER; note = 2'-deoxy-2'-fluorouridine-3'-phosphate
  modified_base 10: mod_base = OTHER; note = 2'-O-methylcytidine-3'-phosphate
  modified_base 11: mod_base = OTHER; note = 2'-O-methyluridine-3'-phosphate
  modified_base 12: mod_base = OTHER; note = 2'-O-methyluridine-3'-phosphate
  modified_base 13: mod_base = OTHER; note = 2'-O-methylcytidine-3'-phosphate
  modified_base 14: mod_base = OTHER; note = 2'-O-methyladenosine-3'-phosphate
  modified_base 15: mod_base = OTHER; note = 2'-O-methyladenosine-3'-phosphate
  modified_base 16: mod_base = OTHER; note = 2'-O-methyladenosine-3'-phosphate
  modified_base 17: mod_base = OTHER; note = 2'-O-methyladenosine-3'-phosphate
  modified_base 18: mod_base = OTHER; note = 2'-O-methyluridine-3'-phosphate
  modified_base 19: mod_base = OTHER; note = 2'-O-methyladenosine-3'-phosphate ((2S,4R)-1-[29-[[2-(acetylamino)-2-deoxy-beta-D-galactopyra nosyl]oxy]-14,14-bis[[3-[[3-[[5-[[2-(acetylamino)-2-deoxy-b eta-D-galactopyranosyl]oxy]-1-oxopentyl]amino]propyl]amino] -3-oxopropoxy]methyl]-1,12,19,25-tetraoxo-16-oxa-13,20,24-t riazanonacos-1-yl]-4-hydroxy-2-pyrrolidinyl)methyl ester
tggtcagatcttcaaaata

SEQ ID NO: 229 - RNA, 21 nt, synthetic construct
  source 1..21: mol_type = other RNA
  modified_base 1: mod_base = OTHER; note = 2'-O-methyluridine-3'-phosphorothioate
  modified_base 2: mod_base = OTHER; note = 2'-deoxy-2'-fluoroadenosine-3'-phosphorothioate
  modified_base 3: mod_base = OTHER; note = 2'-O-methyluridine-3'-phosphate
  modified_base 4: mod_base = OTHER; note = 2'-O-methyluridine-3'-phosphate
  modified_base 5: mod_base = OTHER; note = 2'-O-methyluridine-3'-phosphate
  modified_base 6: mod_base = OTHER; note = 2'-deoxy-2'-fluorouridine-3'-phosphate
  modified_base 7: mod_base = OTHER; note = 2'-O-methylguanosine-3'-phosphate
  modified_base 8: mod_base = OTHER; note = 2'-O-methyladenosine-3'-phosphate
  modified_base 9: mod_base = OTHER; note = 2'-O-methyladenosine-3'-phosphate
  modified_base 10: mod_base = OTHER; note = 2'-O-methylguanosine-3'-phosphate
  modified_base 11: mod_base = OTHER; note = 2'-O-methyladenosine-3'-phosphate
  modified_base 12: mod_base = OTHER; note = 2'-deoxy-2'-fluorouridine-3'-phosphate
  modified_base 13: mod_base = OTHER; note = 2'-O-methylcytidine-3'-phosphate
  modified_base 14: mod_base = OTHER; note = 2'-deoxy-2'-fluorouridine-3'-phosphate
  modified_base 15: mod_base = OTHER; note = 2'-O-methylguanosine-3'-phosphate
  modified_base 16: mod_base = OTHER; note = 2'-deoxy-2'-fluoroadenosine-3'-phosphate
  modified_base 17: mod_base = OTHER; note = 2'-O-methylcytidine-3'-phosphate
  modified_base 18: mod_base = OTHER; note = 2'-O-methylcytidine-3'-phosphate
  modified_base 19: mod_base = OTHER; note = 2'-O-methyladenosine-3'-phosphorothioate
  modified_base 20: mod_base = OTHER; note = 2'-O-methyluridine-3'-phosphorothioate
  modified_base 21: mod_base = OTHER; note = 2'-O-methyluridine
tattttgaagatctgaccatt

SEQ ID NO: 230 - RNA, 21 nt, synthetic construct
  source 1..21: mol_type = other RNA
  modified_base 3: mod_base = OTHER; note = 5'-methyluridine-3'-phosphate
  modified_base 6: mod_base = OTHER; note = 5'-methyluridine-3'-phosphate
  modified_base 11: mod_base = OTHER; note = 5'-methyluridine-3'-phosphate
  modified_base 13: mod_base = OTHER; note = 5'-methyluridine-3'-phosphate
  modified_base 14: mod_base = OTHER; note = 5'-methyluridine-3'-phosphate
  modified_base 20: mod_base = OTHER; note = 5'-methyluridine-3'-phosphate
aatggtcagatcttcaaaata

SEQ ID NO: 231 - RNA, 21 nt, synthetic construct
  source 1..21: mol_type = other RNA
  modified_base 1: mod_base = OTHER; note = 2'-O-methyladenosine-3'-phosphorothioate
  modified_base 2: mod_base = OTHER; note = 2'-O-methyladenosine-3'-phosphorothioate
  modified_base 3: mod_base = OTHER; note = 2'-O-methyluridine-3'-phosphate
  modified_base 4: mod_base = OTHER; note = 2'-O-methylguanosine-3'-phosphate
  modified_base 5: mod_base = OTHER; note = 2'-O-methylguanosine-3'-phosphate
  modified_base 6: mod_base = OTHER; note = 2'-O-methyluridine-3'-phosphate
  modified_base 7: mod_base = OTHER; note = 2'-deoxy-2'-fluorocytidine-3'-phosphate
  modified_base 8: mod_base = OTHER; note = 2'-O-methyladenosine-3'-phosphate
  modified_base 9: mod_base = OTHER; note = 2'-deoxy-2'-fluoroguanosine-3'-phosphate
  modified_base 10: mod_base = OTHER; note = 2'-deoxy-2'-fluoroadenosine-3'-phosphate
  modified_base 11: mod_base = OTHER; note = 2'-deoxy-2'-fluorouridine-3'-phosphate
  modified_base 12: mod_base = OTHER; note = 2'-O-methylcytidine-3'-phosphate
  modified_base 13: mod_base = OTHER; note = 2'-O-methyluridine-3'-phosphate
  modified_base 14: mod_base = OTHER; note = 2'-O-methyluridine-3'-phosphate
  modified_base 15: mod_base = OTHER; note = 2'-O-methylcytidine-3'-phosphate
  modified_base 16: mod_base = OTHER; note = 2'-O-methyladenosine-3'-phosphate
  modified_base 17: mod_base = OTHER; note = 2'-O-methyladenosine-3'-phosphate
  modified_base 18: mod_base = OTHER; note = 2'-O-methyladenosine-3'-phosphate
  modified_base 19: mod_base = OTHER; note = 2'-O-methyladenosine-3'-phosphate
  modified_base 20: mod_base = OTHER; note = 2'-O-methyluridine-3'-phosphate
  modified_base 21: mod_base = OTHER; note = 2'-O-methyluridine-3'-phosphate ((2S,4R)-1-[29-[[2-(acetylamino)-2-deoxy-beta-D-galactopyra nosyl]oxy]-14,14-bis[[3-[[3-[[5-[[2-(acetylamino)-2-deoxy-b eta-D-galactopyranosyl]oxy]-1-oxopentyl]amino]propyl]amino] -3-oxopropoxy]methyl]-1,12,19,25-tetraoxo-16-oxa-13,20,24-t riazanonacos-1-yl]-4-hydroxy-2-pyrrolidinyl)methyl ester
aatggtcagatcttcaaaatt

SEQ ID NO: 232 - RNA, 23 nt, synthetic construct
  source 1..23: mol_type = other RNA
  modified_base 1: mod_base = OTHER; note = 2'-O-methyladenosine-3'-phosphorothioate
  modified_base 2: mod_base = OTHER; note = 2'-deoxy-2'-fluoroadenosine-3'-phosphorothioate
  modified_base 3: mod_base = OTHER; note = 2'-O-methyluridine-3'-phosphate
  modified_base 4: mod_base = OTHER; note = 2'-O-methyluridine-3'-phosphate
  modified_base 5: mod_base = OTHER; note = 2'-O-methyluridine-3'-phosphate
  modified_base 6: mod_base = OTHER; note = 2'-deoxy-2'-fluorouridine-3'-phosphate
  modified_base 7: mod_base = OTHER; note = 2'-O-methylguanosine-3'-phosphate
  modified_base 8: mod_base = OTHER; note = 2'-deoxy-2'-fluoroadenosine-3'-phosphate
  modified_base 9: mod_base = OTHER; note = 2'-deoxy-2'-fluoroadenosine-3'-phosphate
  modified_base 10: mod_base = OTHER; note = 2'-O-methylguanosine-3'-phosphate
  modified_base 11: mod_base = OTHER; note = 2'-O-methyladenosine-3'-phosphate
  modified_base 12: mod_base = OTHER; note = 2'-O-methyluridine-3'-phosphate
  modified_base 13: mod_base = OTHER; note = 2'-O-methylcytidine-3'-phosphate
  modified_base 14: mod_base = OTHER; note = 2'-deoxy-2'-fluorouridine-3'-phosphate
  modified_base 15: mod_base = OTHER; note = 2'-O-methylguanosine-3'-phosphate
  modified_base 16: mod_base = OTHER; note = 2'-deoxy-2'-fluoroadenosine-3'-phosphate
  modified_base 17: mod_base = OTHER; note = 2'-O-methylcytidine-3'-phosphate
  modified_base 18: mod_base = OTHER; note = 2'-O-methylcytidine-3'-phosphate
  modified_base 19: mod_base = OTHER; note = 2'-O-methyladenosine-3'-phosphate
  modified_base 20: mod_base = OTHER; note = 2'-O-methyluridine-3'-phosphate
  modified_base 21: mod_base = OTHER; note = 2'-O-methyluridine-3'-phosphorothioate
  modified_base 22: mod_base = OTHER; note = 2'-O-methylguanosine-3'-phosphorothioate
  modified_base 23: mod_base = OTHER; note = 2'-O-methylguanosine
aattttgaagatctgaccattgg

SEQ ID NO: 233 - RNA, 23 nt, synthetic construct
  source 1..23: mol_type = other RNA
  modified_base 5: mod_base = OTHER; note = 5'-methyluridine-3'-phosphate
  modified_base 8: mod_base = OTHER; note = 5'-methyluridine-3'-phosphate
  modified_base 13: mod_base = OTHER; note = 5'-methyluridine-3'-phosphate
  modified_base 15: mod_base = OTHER; note = 5'-methyluridine-3'-phosphate
  modified_base 16: mod_base = OTHER; note = 5'-methyluridine-3'-phosphate
  modified_base 22: mod_base = OTHER; note = 5'-methyluridine-3'-phosphate
  modified_base 23: mod_base = OTHER; note = 5'-methyluridine
ccaatggtcagatcttcaaaatt

SEQ ID NO: 234 - RNA, 21 nt, synthetic construct
  source 1..21: mol_type = other RNA
  modified_base 1: mod_base = OTHER; note = 2'-O-methyladenosine-3'-phosphorothioate
  modified_base 2: mod_base = OTHER; note = 2'-O-methyladenosine-3'-phosphorothioate
  modified_base 3: mod_base = OTHER; note = 2'-O-methyluridine-3'-phosphate
  modified_base 4: mod_base = OTHER; note = 2'-O-methylguanosine-3'-phosphate
  modified_base 5: mod_base = OTHER; note = 2'-O-methylguanosine-3'-phosphate
  modified_base 6: mod_base = OTHER; note = 2'-O-methyluridine-3'-phosphate
  modified_base 7: mod_base = OTHER; note = 2'-deoxy-2'-fluorocytidine-3'-phosphate
  modified_base 8: mod_base = OTHER; note = 2'-O-methyladenosine-3'-phosphate
  modified_base 9: mod_base = OTHER; note = 2'-deoxy-2'-fluoroguanosine-3'-phosphate
  modified_base 10: mod_base = OTHER; note = 2'-deoxy-2'-fluoroadenosine-3'-phosphate
  modified_base 11: mod_base = OTHER; note = 2'-deoxy-2'-fluorouridine-3'-phosphate
  modified_base 12: mod_base = OTHER; note = 2'-O-methylcytidine-3'-phosphate
  modified_base 13: mod_base = OTHER; note = 2'-O-methyluridine-3'-phosphate
  modified_base 14: mod_base = OTHER; note = 2'-O-methyluridine-3'-phosphate
  modified_base 15: mod_base = OTHER; note = 2'-O-methylcytidine-3'-phosphate
  modified_base 16: mod_base = OTHER; note = 2'-O-methyladenosine-3'-phosphate
  modified_base 17: mod_base = OTHER; note = 2'-O-methyladenosine-3'-phosphate
  modified_base 18: mod_base = OTHER; note = 2'-O-methyladenosine-3'-phosphate
  modified_base 19: mod_base = OTHER; note = 2'-O-methyladenosine-3'-phosphate
  modified_base 20: mod_base = OTHER; note = 2'-O-methyluridine-3'-phosphate
  modified_base 21: mod_base = OTHER; note = 2'-O-methyluridine-3'-phosphate ((2S,4R)-1-[29-[[2-(acetylamino)-2-deoxy-beta-D-galactopyra nosyl]oxy]-14,14-bis[[3-[[3-[[5-[[2-(acetylamino)-2-deoxy-b eta-D-galactopyranosyl]oxy]-1-oxopentyl]amino]propyl]amino] -3-oxopropoxy]methyl]-1,12,19,25-tetraoxo-16-oxa-13,20,24-t riazanonacos-1-yl]-4-hydroxy-2-pyrrolidinyl)methyl ester
aatggtcagatcttcaaaatt

SEQ ID NO: 235 - RNA, 23 nt, synthetic construct
  source 1..23: mol_type = other RNA
  modified_base 1: mod_base = OTHER; note = 2'-O-methyladenosine-3'-phosphorothioate
  modified_base 2: mod_base = OTHER; note = 2'-deoxy-2'-fluoroadenosine-3'-phosphorothioate
  modified_base 3: mod_base = OTHER; note = 2'-O-methyluridine-3'-phosphate
  modified_base 4: mod_base = OTHER; note = 2'-O-methyluridine-3'-phosphate
  modified_base 5: mod_base = OTHER; note = 2'-O-methyluridine-3'-phosphate
  modified_base 6: mod_base = OTHER; note = 2'-deoxy-2'-fluorouridine-3'-phosphate
  modified_base 7: mod_base = OTHER; note = 2'-O-methylguanosine-3'-phosphate
  modified_base 8: mod_base = OTHER; note = 2'-deoxy-2'-fluoroadenosine-3'-phosphate
  modified_base 9: mod_base = OTHER; note = 2'-deoxy-2'-fluoroadenosine-3'-phosphate
  modified_base 10: mod_base = OTHER; note = 2'-O-methylguanosine-3'-phosphate
  modified_base 11: mod_base = OTHER; note = 2'-O-methyladenosine-3'-phosphate
  modified_base 12: mod_base = OTHER; note = 2'-O-methyluridine-3'-phosphate
  modified_base 13: mod_base = OTHER; note = 2'-O-methylcytidine-3'-phosphate
  modified_base 14: mod_base = OTHER; note = 2'-deoxy-2'-fluorouridine-3'-phosphate
  modified_base 15: mod_base = OTHER; note = 2'-O-methylguanosine-3'-phosphate
  modified_base 16: mod_base = OTHER; note = 2'-deoxy-2'-fluoroadenosine-3'-phosphate
  modified_base 17: mod_base = OTHER; note = 2'-O-methylcytidine-3'-phosphate
  modified_base 18: mod_base = OTHER; note = 2'-O-methylcytidine-3'-phosphate
  modified_base 19: mod_base = OTHER; note = 2'-O-methyladenosine-3'-phosphate
  modified_base 20: mod_base = OTHER; note = 2'-O-methyluridine-3'-phosphate
  modified_base 21: mod_base = OTHER; note = 2'-O-methyluridine-3'-phosphorothioate
  modified_base 22: mod_base = OTHER; note = 2'-O-methylguanosine-3'-phosphorothioate
  modified_base 23: mod_base = OTHER; note = 2'-O-methyluridine
aattttgaagatctgaccattgt

SEQ ID NO: 236 - RNA, 23 nt, synthetic construct
  source 1..23: mol_type = other RNA
  modified_base 5: mod_base = OTHER; note = 5'-methyluridine-3'-phosphate
  modified_base 8: mod_base = OTHER; note = 5'-methyluridine-3'-phosphate
  modified_base 13: mod_base = OTHER; note = 5'-methyluridine-3'-phosphate
  modified_base 15: mod_base = OTHER; note = 5'-methyluridine-3'-phosphate
  modified_base 16: mod_base = OTHER; note = 5'-methyluridine-3'-phosphate
  modified_base 22: mod_base = OTHER; note = 5'-methyluridine-3'-phosphate
  modified_base 23: mod_base = OTHER; note = 5'-methyluridine
acaatggtcagatcttcaaaatt

SEQ ID NO: 237 - RNA, 21 nt, synthetic construct
  source 1..21: mol_type = other RNA
  modified_base 1: mod_base = OTHER; note = 2'-O-methyladenosine-3'-phosphorothioate
  modified_base 2: mod_base = OTHER; note = 2'-O-methyladenosine-3'-phosphorothioate
  modified_base 3: mod_base = OTHER; note = 2'-O-methyluridine-3'-phosphate
  modified_base 4: mod_base = OTHER; note = 2'-O-methylguanosine-3'-phosphate
  modified_base 5: mod_base = OTHER; note = 2'-O-methylguanosine-3'-phosphate
  modified_base 6: mod_base = OTHER; note = 2'-O-methyluridine-3'-phosphate
  modified_base 7: mod_base = OTHER; note = 2'-deoxy-2'-fluorocytidine-3'-phosphate
  modified_base 8: mod_base = OTHER; note = 2'-O-methyladenosine-3'-phosphate
  modified_base 9: mod_base = OTHER; note = 2'-deoxy-2'-fluoroguanosine-3'-phosphate
  modified_base 10: mod_base = OTHER; note = 2'-deoxy-2'-fluoroadenosine-3'-phosphate
  modified_base 11: mod_base = OTHER; note = 2'-deoxy-2'-fluorouridine-3'-phosphate
  modified_base 12: mod_base = OTHER; note = 2'-O-methylcytidine-3'-phosphate
  modified_base 13: mod_base = OTHER; note = 2'-O-methyluridine-3'-phosphate
  modified_base 14: mod_base = OTHER; note = 2'-O-methyluridine-3'-phosphate
  modified_base 15: mod_base = OTHER; note = 2'-O-methylcytidine-3'-phosphate
  modified_base 16: mod_base = OTHER; note = 2'-O-methyladenosine-3'-phosphate
  modified_base 17: mod_base = OTHER; note = 2'-O-methyladenosine-3'-phosphate
  modified_base 18: mod_base = OTHER; note = 2'-O-methyladenosine-3'-phosphate
  modified_base 19: mod_base = OTHER; note = 2'-O-methyladenosine-3'-phosphate
  modified_base 20: mod_base = OTHER; note = 2'-O-methyluridine-3'-phosphate
  modified_base 21: mod_base = OTHER; note = 2'-O-methyluridine-3'-phosphate ((2S,4R)-1-[29-[[2-(acetylamino)-2-deoxy-beta-D-galactopyra nosyl]oxy]-14,14-bis[[3-[[3-[[5-[[2-(acetylamino)-2-deoxy-b eta-D-galactopyranosyl]oxy]-1-oxopentyl]amino]propyl]amino] -3-oxopropoxy]methyl]-1,12,19,25-tetraoxo-16-oxa-13,20,24-t riazanonacos-1-yl]-4-hydroxy-2-pyrrolidinyl)methyl ester
aatggtcagatcttcaaaatt

SEQ ID NO: 238 - RNA, 23 nt, synthetic construct
  source 1..23: mol_type = other RNA
  modified_base 1: mod_base = OTHER; note = 2'-O-methyladenosine-3'-phosphorothioate
  modified_base 2: mod_base = OTHER; note = 2'-deoxy-2'-fluoroadenosine-3'-phosphorothioate
  modified_base 3: mod_base = OTHER; note = 2'-O-methyluridine-3'-phosphate
  modified_base 4: mod_base = OTHER; note = 2'-O-methyluridine-3'-phosphate
  modified_base 5: mod_base = OTHER; note = 2'-O-methyluridine-3'-phosphate
  modified_base 6: mod_base = OTHER; note = 2'-deoxy-2'-fluorouridine-3'-phosphate
  modified_base 7: mod_base = OTHER; note = 2'-O-methylguanosine-3'-phosphate
  modified_base 8: mod_base = OTHER; note = 2'-deoxy-2'-fluoroadenosine-3'-phosphate
  modified_base 9: mod_base = OTHER; note = 2'-deoxy-2'-fluoroadenosine-3'-phosphate
  modified_base 10: mod_base = OTHER; note = 2'-O-methylguanosine-3'-phosphate
  modified_base 11: mod_base = OTHER; note = 2'-O-methyladenosine-3'-phosphate
  modified_base 12: mod_base = OTHER; note = 2'-O-methyluridine-3'-phosphate
  modified_base 13: mod_base = OTHER; note = 2'-O-methylcytidine-3'-phosphate
  modified_base 14: mod_base = OTHER; note = 2'-deoxy-2'-fluorouridine-3'-phosphate
  modified_base 15: mod_base = OTHER; note = 2'-O-methylguanosine-3'-phosphate
  modified_base 16: mod_base = OTHER; note = 2'-deoxy-2'-fluoroadenosine-3'-phosphate
  modified_base 17: mod_base = OTHER; note = 2'-O-methylcytidine-3'-phosphate
  modified_base 18: mod_base = OTHER; note = 2'-O-methylcytidine-3'-phosphate
  modified_base 19: mod_base = OTHER; note = 2'-O-methyladenosine-3'-phosphate
  modified_base 20: mod_base = OTHER; note = 2'-O-methyluridine-3'-phosphate
  modified_base 21: mod_base = OTHER; note = 2'-O-methyluridine-3'-phosphorothioate
  modified_base 22: mod_base = OTHER; note = 2'-O-methylcytidine-3'-phosphorothioate
  modified_base 23: mod_base = OTHER; note = 2'-O-methyluridine
aattttgaagatctgaccattct

SEQ ID NO: 239 - RNA, 23 nt, synthetic construct
  source 1..23: mol_type = other RNA
  modified_base 5: mod_base = OTHER; note = 5'-methyluridine-3'-phosphate
  modified_base 8: mod_base = OTHER; note = 5'-methyluridine-3'-phosphate
  modified_base 13: mod_base = OTHER; note = 5'-methyluridine-3'-phosphate
  modified_base 15: mod_base = OTHER; note = 5'-methyluridine-3'-phosphate
  modified_base 16: mod_base = OTHER; note = 5'-methyluridine-3'-phosphate
  modified_base 22: mod_base = OTHER; note = 5'-methyluridine-3'-phosphate
  modified_base 23: mod_base = OTHER; note = 5'-methyluridine
agaatggtcagatcttcaaaatt

SEQ ID NO: 240 - RNA, 19 nt, synthetic construct
  source 1..19: mol_type = other RNA
  modified_base 1: mod_base = OTHER; note = 2'-O-methyluridine-3'-phosphorothioate
  modified_base 2: mod_base = OTHER; note = 2'-O-methylguanosine-3'-phosphorothioate
  modified_base 3: mod_base = OTHER; note = 2'-O-methylguanosine-3'-phosphate
  modified_base 4: mod_base = OTHER; note = 2'-O-methyluridine-3'-phosphate
  modified_base 5: mod_base = OTHER; note = 2'-deoxy-2'-fluorocytidine-3'-phosphate
  modified_base 6: mod_base = OTHER; note = 2'-O-methyladenosine-3'-phosphate
  modified_base 7: mod_base = OTHER; note = 2'-deoxy-2'-fluoroguanosine-3'-phosphate
  modified_base 8: mod_base = OTHER; note = 2'-deoxy-2'-fluoroadenosine-3'-phosphate
  modified_base 9: mod_base = OTHER; note = 2'-deoxy-2'-fluorouridine-3'-phosphate
  modified_base 10: mod_base = OTHER; note = 2'-O-methylcytidine-3'-phosphate
  modified_base 11: mod_base = OTHER; note = 2'-O-methyluridine-3'-phosphate
  modified_base 12: mod_base = OTHER; note = 2'-O-methyluridine-3'-phosphate
  modified_base 13: mod_base = OTHER; note = 2'-O-methylcytidine-3'-phosphate
  modified_base 14: mod_base = OTHER; note = 2'-O-methyladenosine-3'-phosphate
  modified_base 15: mod_base = OTHER; note = 2'-O-methyladenosine-3'-phosphate
  modified_base 16: mod_base = OTHER; note = 2'-O-methyladenosine-3'-phosphate
  modified_base 17: mod_base = OTHER; note = 2'-O-methyladenosine-3'-phosphate
  modified_base 18: mod_base = OTHER; note = 2'-O-methyluridine-3'-phosphate
  modified_base 19: mod_base = OTHER; note = 2'-O-methyluridine-3'-phosphate ((2S,4R)-1-[29-[[2-(acetylamino)-2-deoxy-beta-D-galactopyra nosyl]oxy]-14,14-bis[[3-[[3-[[5-[[2-(acetylamino)-2-deoxy-b eta-D-galactopyranosyl]oxy]-1-oxopentyl]amino]propyl]amino] -3-oxopropoxy]methyl]-1,12,19,25-tetraoxo-16-oxa-13,20,24-t riazanonacos-1-yl]-4-hydroxy-2-pyrrolidinyl)methyl ester
tggtcagatcttcaaaatt

SEQ ID NO: 241 - RNA, 21 nt, synthetic construct
  source 1..21: mol_type = other RNA
  modified_base 1: mod_base = OTHER; note = 2'-O-methyladenosine-3'-phosphorothioate
  modified_base 2: mod_base = OTHER; note = 2'-deoxy-2'-fluoroadenosine-3'-phosphorothioate
  modified_base 3: mod_base = OTHER; note = 2'-O-methyluridine-3'-phosphate
  modified_base 4: mod_base = OTHER; note = 2'-O-methyluridine-3'-phosphate
  modified_base 5: mod_base = OTHER; note = 2'-O-methyluridine-3'-phosphate
  modified_base 6: mod_base = OTHER; note = 2'-deoxy-2'-fluorouridine-3'-phosphate
  modified_base 7: mod_base = OTHER; note = 2'-O-methylguanosine-3'-phosphate
  modified_base 8: mod_base = OTHER; note = 2'-deoxy-2'-fluoroadenosine-3'-phosphate
  modified_base 9: mod_base = OTHER; note = 2'-deoxy-2'-fluoroadenosine-3'-phosphate
  modified_base 10: mod_base = OTHER; note = 2'-O-methylguanosine-3'-phosphate
  modified_base 11: mod_base = OTHER; note = 2'-O-methyladenosine-3'-phosphate
  modified_base 12: mod_base = OTHER; note = 2'-O-methyluridine-3'-phosphate
  modified_base 13: mod_base = OTHER; note = 2'-O-methylcytidine-3'-phosphate
  modified_base 14: mod_base = OTHER; note = 2'-deoxy-2'-fluorouridine-3'-phosphate
  modified_base 15: mod_base = OTHER; note = 2'-O-methylguanosine-3'-phosphate
  modified_base 16: mod_base = OTHER; note = 2'-deoxy-2'-fluoroadenosine-3'-phosphate
  modified_base 17: mod_base = OTHER; note = 2'-O-methylcytidine-3'-phosphate
  modified_base 18: mod_base = OTHER; note = 2'-O-methylcytidine-3'-phosphate
  modified_base 19: mod_base = OTHER; note = 2'-O-methyladenosine-3'-phosphorothioate
  modified_base 20: mod_base = OTHER; note = 2'-O-methyluridine-3'-phosphorothioate
  modified_base 21: mod_base = OTHER; note = 2'-O-methyluridine
aattttgaagatctgaccatt

SEQ ID NO: 242 - RNA, 21 nt, synthetic construct
  source 1..21: mol_type = other RNA
  modified_base 3: mod_base = OTHER; note = 5'-methyluridine-3'-phosphate
  modified_base 6: mod_base = OTHER; note = 5'-methyluridine-3'-phosphate
  modified_base 11: mod_base = OTHER; note = 5'-methyluridine-3'-phosphate
  modified_base 13: mod_base = OTHER; note = 5'-methyluridine-3'-phosphate
  modified_base 14: mod_base = OTHER; note = 5'-methyluridine-3'-phosphate
  modified_base 20: mod_base = OTHER; note = 5'-methyluridine-3'-phosphate
  modified_base 21: mod_base = OTHER; note = 5'-methyluridine
aatggtcagatcttcaaaatt

SEQ ID NO: 243 - RNA, 21 nt, synthetic construct
  source 1..21: mol_type = other RNA
  modified_base 1: mod_base = OTHER; note = 2'-O-methyladenosine-3'-phosphorothioate
  modified_base 2: mod_base = OTHER; note = 2'-O-methyladenosine-3'-phosphorothioate
  modified_base 3: mod_base = OTHER; note = 2'-O-methyluridine-3'-phosphate
  modified_base 4: mod_base = OTHER; note = 2'-O-methylguanosine-3'-phosphate
  modified_base 5: mod_base = OTHER; note = 2'-O-methylguanosine-3'-phosphate
  modified_base 6: mod_base = OTHER; note = 2'-O-methyluridine-3'-phosphate
  modified_base 7: mod_base = OTHER; note = 2'-deoxy-2'-fluorocytidine-3'-phosphate
  modified_base 8: mod_base = OTHER; note = 2'-O-methyladenosine-3'-phosphate
  modified_base 9: mod_base = OTHER; note = 2'-deoxy-2'-fluoroguanosine-3'-phosphate
  modified_base 10: mod_base = OTHER; note = 2'-deoxy-2'-fluoroadenosine-3'-phosphate
  modified_base 11: mod_base = OTHER; note = 2'-deoxy-2'-fluorouridine-3'-phosphate
  modified_base 12: mod_base = OTHER; note = 2'-O-methylcytidine-3'-phosphate
  modified_base 13: mod_base = OTHER; note = 2'-O-methyluridine-3'-phosphate
  modified_base 14: mod_base = OTHER; note = 2'-O-methyluridine-3'-phosphate
  modified_base 15: mod_base = OTHER; note = 2'-O-methylcytidine-3'-phosphate
  modified_base 16: mod_base = OTHER; note = 2'-O-methyladenosine-3'-phosphate
  modified_base 17: mod_base = OTHER; note = 2'-O-methyladenosine-3'-phosphate
  modified_base 18: mod_base = OTHER; note = 2'-O-methyladenosine-3'-phosphate
  modified_base 19: mod_base = OTHER; note = 2'-O-methyladenosine-3'-phosphate
  modified_base 20: mod_base = OTHER; note = 2'-O-methyluridine-3'-phosphate
  modified_base 21: mod_base = OTHER; note = 2'-O-methyluridine-3'-phosphate ((2S,4R)-1-[29-[[2-(acetylamino)-2-deoxy-beta-D-galactopyra nosyl]oxy]-14,14-bis[[3-[[3-[[5-[[2-(acetylamino)-2-deoxy-b eta-D-galactopyranosyl]oxy]-1-oxopentyl]amino]propyl]amino] -3-oxopropoxy]methyl]-1,12,19,25-tetraoxo-16-oxa-13,20,24-t riazanonacos-1-yl]-4-hydroxy-2-pyrrolidinyl)methyl ester
aatggtcagatcttcaaaatt

SEQ ID NO: 244 - RNA, 23 nt, synthetic construct
  source 1..23: mol_type = other RNA
  modified_base 1: mod_base = OTHER; note = 2'-O-methyladenosine-3'-phosphorothioate
  modified_base 2: mod_base = OTHER; note = 2'-deoxy-2'-fluoroadenosine-3'-phosphorothioate
  modified_base 3: mod_base = OTHER; note = 2'-O-methyluridine-3'-phosphate
  modified_base 4: mod_base = OTHER; note = 2'-O-methyluridine-3'-phosphate
  modified_base 5: mod_base = OTHER; note = 2'-O-methyluridine-3'-phosphate
  modified_base 6: mod_base = OTHER; note = 2'-deoxy-2'-fluorouridine-3'-phosphate
  modified_base 7: mod_base = OTHER; note = 2'-O-methylguanosine-3'-phosphate
  modified_base 8: mod_base = OTHER; note = 2'-deoxy-2'-fluoroadenosine-3'-phosphate
  modified_base 9: mod_base = OTHER; note = 2'-deoxy-2'-fluoroadenosine-3'-phosphate
  modified_base 10: mod_base = OTHER; note = 2'-O-methylguanosine-3'-phosphate
  modified_base 11: mod_base = OTHER; note = 2'-O-methyladenosine-3'-phosphate
  modified_base 12: mod_base = OTHER; note = 2'-deoxy-2'-fluorouridine-3'-phosphate
  modified_base 13: mod_base = OTHER; note = 2'-O-methylcytidine-3'-phosphate
  modified_base 14: mod_base = OTHER; note = 2'-deoxy-2'-fluorouridine-3'-phosphate
  modified_base 15: mod_base = OTHER; note = 2'-O-methylguanosine-3'-phosphate
  modified_base 16: mod_base = OTHER; note = 2'-deoxy-2'-fluoroadenosine-3'-phosphate
  modified_base 17: mod_base = OTHER; note = 2'-O-methylcytidine-3'-phosphate
  modified_base 18: mod_base = OTHER; note = 2'-O-methylcytidine-3'-phosphate
  modified_base 19: mod_base = OTHER; note = 2'-O-methyladenosine-3'-phosphate
  modified_base 20: mod_base = OTHER; note = 2'-O-methyluridine-3'-phosphate
  modified_base 21: mod_base = OTHER; note = 2'-O-methyluridine-3'-phosphorothioate
  modified_base 22: mod_base = OTHER; note = 2'-O-methylguanosine-3'-phosphorothioate
  modified_base 23: mod_base = OTHER; note = 2'-O-methylguanosine
aattttgaagatctgaccattgg

SEQ ID NO: 245 - RNA, 23 nt, synthetic construct
  source 1..23: mol_type = other RNA
  modified_base 5: mod_base = OTHER; note = 5'-methyluridine-3'-phosphate
  modified_base 8: mod_base = OTHER; note = 5'-methyluridine-3'-phosphate
  modified_base 13: mod_base = OTHER; note = 5'-methyluridine-3'-phosphate
  modified_base 15: mod_base = OTHER; note = 5'-methyluridine-3'-phosphate
  modified_base 16: mod_base = OTHER; note = 5'-methyluridine-3'-phosphate
  modified_base 22: mod_base = OTHER; note = 5'-methyluridine-3'-phosphate
  modified_base 23: mod_base = OTHER; note = 5'-methyluridine
ccaatggtcagatcttcaaaatt

SEQ ID NO: 246 - RNA, 21 nt, synthetic construct
  source 1..21: mol_type = other RNA
  modified_base 1: mod_base = OTHER; note = 2'-O-methyladenosine-3'-phosphorothioate
  modified_base 2: mod_base = OTHER; note = 2'-O-methyladenosine-3'-phosphorothioate
  modified_base 3: mod_base = OTHER; note = 2'-O-methyluridine-3'-phosphate
  modified_base 4: mod_base = OTHER; note = 2'-O-methylguanosine-3'-phosphate
  modified_base 5: mod_base = OTHER; note = 2'-O-methylguanosine-3'-phosphate
  modified_base 6: mod_base = OTHER; note = 2'-O-methyluridine-3'-phosphate
  modified_base 7: mod_base = OTHER; note = 2'-O-methylcytidine-3'-phosphate
  modified_base 8: mod_base = OTHER; note = 2'-O-methyladenosine-3'-phosphate
  modified_base 9: mod_base = OTHER; note = 2'-deoxy-2'-fluoroguanosine-3'-phosphate
  modified_base 10: mod_base = OTHER; note = 2'-deoxy-2'-fluoroadenosine-3'-phosphate
  modified_base 11: mod_base = OTHER; note = 2'-deoxy-2'-fluorouridine-3'-phosphate
  modified_base 12: mod_base = OTHER; note = 2'-O-methylcytidine-3'-phosphate
  modified_base 13: mod_base = OTHER; note = 2'-O-methyluridine-3'-phosphate
  modified_base 14: mod_base = OTHER; note = 2'-O-methyluridine-3'-phosphate
  modified_base 15: mod_base = OTHER; note = 2'-O-methylcytidine-3'-phosphate
  modified_base 16: mod_base = OTHER; note = 2'-O-methyladenosine-3'-phosphate
  modified_base 17: mod_base = OTHER; note = 2'-O-methyladenosine-3'-phosphate
  modified_base 18: mod_base = OTHER; note = 2'-O-methyladenosine-3'-phosphate
  modified_base 19: mod_base = OTHER; note = 2'-O-methyladenosine-3'-phosphate
  modified_base 20: mod_base = OTHER; note = 2'-O-methyluridine-3'-phosphate
  modified_base 21: mod_base = OTHER; note = 2'-O-methyluridine-3'-phosphate ((2S,4R)-1-[29-[[2-(acetylamino)-2-deoxy-beta-D-galactopyra nosyl]oxy]-14,14-bis[[3-[[3-[[5-[[2-(acetylamino)-2-deoxy-b eta-D-galactopyranosyl]oxy]-1-oxopentyl]amino]propyl]amino] -3-oxopropoxy]methyl]-1,12,19,25-tetraoxo-16-oxa-13,20,24-t riazanonacos-1-yl]-4-hydroxy-2-pyrrolidinyl)methyl ester
aatggtcagatcttcaaaatt

SEQ ID NO: 247 - RNA, 23 nt, synthetic construct
  source 1..23: mol_type = other RNA
  modified_base 1: mod_base = OTHER; note = 2'-O-methyladenosine-3'-phosphorothioate
  modified_base 2: mod_base = OTHER; note = 2'-deoxy-2'-fluoroadenosine-3'-phosphorothioate
  modified_base 3: mod_base = OTHER; note = 2'-O-methyluridine-3'-phosphate
  modified_base 4: mod_base = OTHER; note = 2'-O-methyluridine-3'-phosphate
  modified_base 5: mod_base = OTHER; note = 2'-O-methyluridine-3'-phosphate
  modified_base 6: mod_base = OTHER; note = 2'-deoxy-2'-fluorouridine-3'-phosphate
  modified_base 7: mod_base = OTHER; note = 2'-O-methylguanosine-3'-phosphate
  modified_base 8: mod_base = OTHER; note = 2'-deoxy-2'-fluoroadenosine-3'-phosphate
  modified_base 9: mod_base = OTHER; note = 2'-deoxy-2'-fluoroadenosine-3'-phosphate
  modified_base 10: mod_base = OTHER; note = 2'-O-methylguanosine-3'-phosphate
  modified_base 11: mod_base = OTHER; note = 2'-O-methyladenosine-3'-phosphate
  modified_base 12: mod_base = OTHER; note = 2'-O-methyluridine-3'-phosphate
  modified_base 13: mod_base = OTHER; note = 2'-O-methylcytidine-3'-phosphate
  modified_base 14: mod_base = OTHER; note = 2'-deoxy-2'-fluorouridine-3'-phosphate
  modified_base 15: mod_base = OTHER; note = 2'-O-methylguanosine-3'-phosphate
  modified_base 16: mod_base = OTHER; note = 2'-deoxy-2'-fluoroadenosine-3'-phosphate
  modified_base 17: mod_base = OTHER; note = 2'-O-methylcytidine-3'-phosphate
  modified_base 18: mod_base = OTHER; note = 2'-O-methylcytidine-3'-phosphate
  modified_base 19: mod_base = OTHER; note = 2'-O-methyladenosine-3'-phosphate
  modified_base 20: mod_base = OTHER; note = 2'-O-methyluridine-3'-phosphate
  modified_base 21: mod_base = OTHER; note = 2'-O-methyluridine-3'-phosphorothioate
  modified_base 22: mod_base = OTHER; note = 2'-O-methylguanosine-3'-phosphorothioate
  modified_base 23: mod_base = OTHER; note = 2'-O-methylguanosine
aattttgaagatctgaccattgg

SEQ ID NO: 248 - RNA, 23 nt, synthetic construct
  source 1..23: mol_type = other RNA
  modified_base 5: mod_base = OTHER; note = 5'-methyluridine-3'-phosphate
  modified_base 8: mod_base = OTHER; note = 5'-methyluridine-3'-phosphate
  modified_base 13: mod_base = OTHER; note = 5'-methyluridine-3'-phosphate
  modified_base 15: mod_base = OTHER; note = 5'-methyluridine-3'-phosphate
  modified_base 16: mod_base = OTHER; note = 5'-methyluridine-3'-phosphate
  modified_base 22: mod_base = OTHER; note = 5'-methyluridine-3'-phosphate
  modified_base 23: mod_base = OTHER; note = 5'-methyluridine
ccaatggtcagatcttcaaaatt

SEQ ID NO: 249 - RNA, 21 nt, synthetic construct
  source 1..21: mol_type = other RNA
  modified_base 1: mod_base = OTHER; note = 2'-O-methyladenosine-3'-phosphorothioate
  modified_base 2: mod_base = OTHER; note = 2'-O-methyladenosine-3'-phosphorothioate
  modified_base 3: mod_base = OTHER; note = 2'-O-methyluridine-3'-phosphate
  modified_base 4: mod_base = OTHER; note = 2'-O-methylguanosine-3'-phosphate
  modified_base 5: mod_base = OTHER; note = 2'-O-methylguanosine-3'-phosphate
  modified_base 6: mod_base = OTHER; note = 2'-O-methyluridine-3'-phosphate
  modified_base 7: mod_base = OTHER; note = 2'-deoxy-2'-fluorocytidine-3'-phosphate
  modified_base 8: mod_base = OTHER; note = 2'-O-methyladenosine-3'-phosphate
  modified_base 9: mod_base = OTHER; note = 2'-deoxy-2'-fluoroguanosine-3'-phosphate
  modified_base 10: mod_base = OTHER; note = 2'-deoxy-2'-fluoroadenosine-3'-phosphate
  modified_base 11: mod_base = OTHER; note = 2'-deoxy-2'-fluorouridine-3'-phosphate
  modified_base 12: mod_base = OTHER; note = 2'-O-methylcytidine-3'-phosphate
  modified_base 13: mod_base = OTHER; note = 2'-O-methyluridine-3'-phosphate
  modified_base 14: mod_base = OTHER; note = 2'-O-methyluridine-3'-phosphate
  modified_base 15: mod_base = OTHER; note = 2'-O-methylcytidine-3'-phosphate
  modified_base 16: mod_base = OTHER; note = 2'-O-methyladenosine-3'-phosphate
  modified_base 17: mod_base = OTHER; note = 2'-O-methyladenosine-3'-phosphate
  modified_base 18: mod_base = OTHER; note = 2'-O-methyladenosine-3'-phosphate
  modified_base 19: mod_base = OTHER; note = 2'-O-methyladenosine-3'-phosphate
  modified_base 20: mod_base = OTHER; note = 2'-O-methyluridine-3'-phosphate
  modified_base 21: mod_base = OTHER; note = 2'-O-methyluridine-3'-phosphate ((2S,4R)-1-[29-[[2-(acetylamino)-2-deoxy-beta-D-galactopyra nosyl]oxy]-14,14-bis[[3-[[3-[[5-[[2-(acetylamino)-2-deoxy-b eta-D-galactopyranosyl]oxy]-1-oxopentyl]amino]propyl]amino] -3-oxopropoxy]methyl]-1,12,19,25-tetraoxo-16-oxa-13,20,24-t riazanonacos-1-yl]-4-hydroxy-2-pyrrolidinyl)methyl ester
aatggtcagatcttcaaaatt

SEQ ID NO: 250 - RNA, 23 nt, synthetic construct
  source 1..23: mol_type = other RNA
  modified_base 1: mod_base = OTHER; note = 2'-O-methyladenosine-3'-phosphorothioate
  modified_base 2: mod_base = OTHER; note = 2'-deoxy-2'-fluoroadenosine-3'-phosphorothioate
  modified_base 3: mod_base = OTHER; note = 2'-O-methyluridine-3'-phosphate
  modified_base 4: mod_base = OTHER; note = 2'-O-methyluridine-3'-phosphate
  modified_base 5: mod_base = OTHER; note = 2'-O-methyluridine-3'-phosphate
  modified_base 6: mod_base = OTHER; note = 2'-deoxy-2'-fluorouridine-3'-phosphate
  modified_base 7: mod_base = OTHER; note = 2'-O-methylguanosine-3'-phosphate
  modified_base 8: mod_base = OTHER; note = 2'-O-methyladenosine-3'-phosphate
  modified_base 9: mod_base = OTHER; note = 2'-O-methyladenosine-3'-phosphate
  modified_base 10: mod_base = OTHER; note = 2'-O-methylguanosine-3'-phosphate
  modified_base 11: mod_base = OTHER; note = 2'-O-methyladenosine-3'-phosphate
  modified_base 12: mod_base = OTHER; note = 2'-O-methyluridine-3'-phosphate
  modified_base 13: mod_base = OTHER; note = 2'-O-methylcytidine-3'-phosphate
  modified_base 14: mod_base = OTHER; note = 2'-deoxy-2'-fluorouridine-3'-phosphate
  modified_base 15: mod_base = OTHER; note = 2'-O-methylguanosine-3'-phosphate
  modified_base 16: mod_base = OTHER; note = 2'-deoxy-2'-fluoroadenosine-3'-phosphate
  modified_base 17: mod_base = OTHER; note = 2'-O-methylcytidine-3'-phosphate
  modified_base 18: mod_base = OTHER; note = 2'-O-methylcytidine-3'-phosphate
  modified_base 19: mod_base = OTHER; note = 2'-O-methyladenosine-3'-phosphate
  modified_base 20: mod_base = OTHER; note = 2'-O-methyluridine-3'-phosphate
  modified_base 21: mod_base = OTHER; note = 2'-O-methyluridine-3'-phosphorothioate
  modified_base 22: mod_base = OTHER; note = 2'-O-methylguanosine-3'-phosphorothioate
  modified_base 23: mod_base = OTHER; note = 2'-O-methylguanosine
aattttgaagatctgaccattgg

SEQ ID NO: 251 - RNA, 23 nt, synthetic construct
  source 1..23: mol_type = other RNA
  modified_base 5: mod_base = OTHER; note = 5'-methyluridine-3'-phosphate
  modified_base 8: mod_base = OTHER; note = 5'-methyluridine-3'-phosphate
  modified_base 13: mod_base = OTHER; note = 5'-methyluridine-3'-phosphate
  modified_base 15: mod_base = OTHER; note = 5'-methyluridine-3'-phosphate
  modified_base 16: mod_base = OTHER; note = 5'-methyluridine-3'-phosphate
  modified_base 22: mod_base = OTHER; note = 5'-methyluridine-3'-phosphate
  modified_base 23: mod_base = OTHER; note = 5'-methyluridine
ccaatggtcagatcttcaaaatt

SEQ ID NO: 252 - RNA, 21 nt, synthetic construct
  source 1..21: mol_type = other RNA
  modified_base 1: mod_base = OTHER; note = 2'-O-methyladenosine-3'-phosphorothioate
  modified_base 2: mod_base = OTHER; note = 2'-O-methyladenosine-3'-phosphorothioate
  modified_base 3: mod_base = OTHER; note = 2'-O-methyluridine-3'-phosphate
  modified_base 4: mod_base = OTHER; note = 2'-O-methylguanosine-3'-phosphate
  modified_base 5: mod_base = OTHER; note = 2'-O-methylguanosine-3'-phosphate
  modified_base 6: mod_base = OTHER; note = 2'-O-methyluridine-3'-phosphate
  modified_base 7: mod_base = OTHER; note = 2'-deoxy-2'-fluorocytidine-3'-phosphate
  modified_base 8: mod_base = OTHER; note = 2'-O-methyladenosine-3'-phosphate
  modified_base 9: mod_base = OTHER; note = 2'-deoxy-2'-fluoroguanosine-3'-phosphate
  modified_base 10: mod_base = OTHER; note = 2'-deoxy-2'-fluoroadenosine-3'-phosphate
  modified_base 11: mod_base = OTHER; note = 2'-deoxy-2'-fluorouridine-3'-phosphate
  modified_base 12: mod_base = OTHER; note = 2'-O-methylcytidine-3'-phosphate
  modified_base 13: mod_base = OTHER; note = 2'-O-methyluridine-3'-phosphate
  modified_base 14: mod_base = OTHER; note = 2'-O-methyluridine-3'-phosphate
  modified_base 15: mod_base = OTHER; note = 2'-O-methylcytidine-3'-phosphate
  modified_base 16: mod_base = OTHER; note = 2'-O-methyladenosine-3'-phosphate
  modified_base 17: mod_base = OTHER; note = 2'-O-methyladenosine-3'-phosphate
  modified_base 18: mod_base = OTHER; note = 2'-O-methyladenosine-3'-phosphate
  modified_base 19: mod_base = OTHER; note = 2'-O-methyladenosine-3'-phosphate
  modified_base 20: mod_base = OTHER; note = 2'-O-methyluridine-3'-phosphate
  modified_base 21: mod_base = OTHER; note = 2'-O-methyluridine-3'-phosphate ((2S,4R)-1-[29-[[2-(acetylamino)-2-deoxy-beta-D-galactopyra nosyl]oxy]-14,14-bis[[3-[[3-[[5-[[2-(acetylamino)-2-deoxy-b eta-D-galactopyranosyl]oxy]-1-oxopentyl]amino]propyl]amino] -3-oxopropoxy]methyl]-1,12,19,25-tetraoxo-16-oxa-13,20,24-t riazanonacos-1-yl]-4-hydroxy-2-pyrrolidinyl)methyl ester
aatggtcagatcttcaaaatt

SEQ ID NO: 253 - RNA, 23 nt, synthetic construct
  source 1..23: mol_type = other RNA
  modified_base 1: mod_base = OTHER; note = 2'-O-methyladenosine-3'-phosphorothioate
  modified_base 2: mod_base = OTHER; note = 2'-deoxy-2'-fluoroadenosine-3'-phosphorothioate
  modified_base 3: mod_base = OTHER; note = 2'-O-methyluridine-3'-phosphate
  modified_base 4: mod_base = OTHER; note = 2'-O-methyluridine-3'-phosphate
  modified_base 5: mod_base = OTHER; note = 2'-O-methyluridine-3'-phosphate
  modified_base 6: mod_base = OTHER; note = 2'-deoxy-2'-fluorouridine-3'-phosphate
  modified_base 7: mod_base = OTHER; note = 2'-O-methylguanosine-3'-phosphate
  modified_base 8: mod_base = OTHER; note = 2'-O-methyladenosine-3'-phosphate
  modified_base 9: mod_base = OTHER; note = 2'-O-methyladenosine-3'-phosphate
  modified_base 10: mod_base = OTHER; note = 2'-O-methylguanosine-3'-phosphate
  modified_base 11: mod_base = OTHER; note = 2'-O-methyladenosine-3'-phosphate
  modified_base 12: mod_base = OTHER; note = 2'-deoxy-2'-fluorouridine-3'-phosphate
  modified_base 13: mod_base = OTHER; note = 2'-O-methylcytidine-3'-phosphate
  modified_base 14: mod_base = OTHER; note = 2'-deoxy-2'-fluorouridine-3'-phosphate
  modified_base 15: mod_base = OTHER; note = 2'-O-methylguanosine-3'-phosphate
  modified_base 16: mod_base = OTHER; note = 2'-deoxy-2'-fluoroadenosine-3'-phosphate
  modified_base 17: mod_base = OTHER; note = 2'-O-methylcytidine-3'-phosphate
  modified_base 18: mod_base = OTHER; note = 2'-O-methylcytidine-3'-phosphate
  modified_base 19: mod_base = OTHER; note = 2'-O-methyladenosine-3'-phosphate
  modified_base 20: mod_base = OTHER; note = 2'-O-methyluridine-3'-phosphate
  modified_base 21: mod_base = OTHER; note = 2'-O-methyluridine-3'-phosphorothioate
  modified_base 22: mod_base = OTHER; note = 2'-O-methylguanosine-3'-phosphorothioate
  modified_base 23: mod_base = OTHER; note = 2'-O-methylguanosine
aattttgaagatctgaccattgg

SEQ ID NO: 254 - RNA, 23 nt, synthetic construct
  source 1..23: mol_type = other RNA
  modified_base 5: mod_base = OTHER; note = 5'-methyluridine-3'-phosphate
  modified_base 8: mod_base = OTHER; note = 5'-methyluridine-3'-phosphate
  modified_base 13: mod_base = OTHER; note = 5'-methyluridine-3'-phosphate
  modified_base 15: mod_base = OTHER; note = 5'-methyluridine-3'-phosphate
  modified_base 16: mod_base = OTHER; note = 5'-methyluridine-3'-phosphate
  modified_base 22: mod_base = OTHER; note = 5'-methyluridine-3'-phosphate
  modified_base 23: mod_base = OTHER; note = 5'-methyluridine
ccaatggtcagatcttcaaaatt

SEQ ID NO: 255 - RNA, 21 nt, synthetic construct
  source 1..21: mol_type = other RNA
  modified_base 1: mod_base = OTHER; note = 2'-O-methyladenosine-3'-phosphorothioate
  modified_base 2: mod_base = OTHER; note = 2'-O-methyladenosine-3'-phosphorothioate
  modified_base 3: mod_base = OTHER; note = 2'-O-methyluridine-3'-phosphate
  modified_base 4: mod_base = OTHER; note = 2'-O-methylguanosine-3'-phosphate
  modified_base 5: mod_base = OTHER; note = 2'-O-methylguanosine-3'-phosphate
  modified_base 6: mod_base = OTHER; note = 2'-O-methyluridine-3'-phosphate
  modified_base 7: mod_base = OTHER; note = 2'-O-methylcytidine-3'-phosphate
  modified_base 8: mod_base = OTHER; note = 2'-O-methyladenosine-3'-phosphate
  modified_base 9: mod_base = OTHER; note = 2'-deoxy-2'-fluoroguanosine-3'-phosphate
  modified_base 10: mod_base = OTHER; note = 2'-deoxy-2'-fluoroadenosine-3'-phosphate
  modified_base 11: mod_base = OTHER; note = 2'-deoxy-2'-fluorouridine-3'-phosphate
  modified_base 12: mod_base = OTHER; note = 2'-O-methylcytidine-3'-phosphate
  modified_base 13: mod_base = OTHER; note = 2'-O-methyluridine-3'-phosphate
  modified_base 14: mod_base = OTHER; note = 2'-O-methyluridine-3'-phosphate
  modified_base 15: mod_base = OTHER; note = 2'-O-methylcytidine-3'-phosphate
  modified_base 16: mod_base = OTHER; note = 2'-O-methyladenosine-3'-phosphate
  modified_base 17: mod_base = OTHER; note = 2'-O-methyladenosine-3'-phosphate
  modified_base 18: mod_base = OTHER; note = 2'-O-methyladenosine-3'-phosphate
  modified_base 19: mod_base = OTHER; note = 2'-O-methyladenosine-3'-phosphate
  modified_base 20: mod_base = OTHER; note = 2'-O-methyluridine-3'-phosphate
  modified_base 21: mod_base = OTHER; note = 2'-O-methyluridine-3'-phosphate ((2S,4R)-1-[29-[[2-(acetylamino)-2-deoxy-beta-D-galactopyra nosyl]oxy]-14,14-bis[[3-[[3-[[5-[[2-(acetylamino)-2-deoxy-b eta-D-galactopyranosyl]oxy]-1-oxopentyl]amino]propyl]amino] -3-oxopropoxy]methyl]-1,12,19,25-tetraoxo-16-oxa-13,20,24-t riazanonacos-1-yl]-4-hydroxy-2-pyrrolidinyl)methyl ester
aatggtcagatcttcaaaatt

SEQ ID NO: 256 - RNA, 23 nt, synthetic construct
  source 1..23: mol_type = other RNA
  modified_base 1: mod_base = OTHER; note = 2'-O-methyladenosine-3'-phosphorothioate
  modified_base 2: mod_base = OTHER; note = 2'-deoxy-2'-fluoroadenosine-3'-phosphorothioate
  modified_base 3: mod_base = OTHER; note = 2'-O-methyluridine-3'-phosphate
  modified_base 4: mod_base = OTHER; note = 2'-O-methyluridine-3'-phosphate
  modified_base 5: mod_base = OTHER; note = 2'-O-methyluridine-3'-phosphate
  modified_base 6: mod_base = OTHER; note = 2'-deoxy-2'-fluorouridine-3'-phosphate
  modified_base 7: mod_base = OTHER; note = 2'-O-methylguanosine-3'-phosphate
  modified_base 8: mod_base = OTHER; note = 2'-deoxy-2'-fluoroadenosine-3'-phosphate
  modified_base 9: mod_base = OTHER; note = 2'-deoxy-2'-fluoroadenosine-3'-phosphate
  modified_base 10: mod_base = OTHER; note = 2'-O-methylguanosine-3'-phosphate
  modified_base 11: mod_base = OTHER; note = 2'-O-methyladenosine-3'-phosphate
  modified_base 12: mod_base = OTHER; note = 2'-deoxy-2'-fluorouridine-3'-phosphate
  modified_base 13: mod_base = OTHER; note = 2'-O-methylcytidine-3'-phosphate
  modified_base 14: mod_base = OTHER; note = 2'-deoxy-2'-fluorouridine-3'-phosphate
  modified_base 15: mod_base = OTHER; note = 2'-O-methylguanosine-3'-phosphate
  modified_base 16: mod_base = OTHER; note = 2'-deoxy-2'-fluoroadenosine-3'-phosphate
  modified_base 17: mod_base = OTHER; note = 2'-O-methylcytidine-3'-phosphate
  modified_base 18: mod_base = OTHER; note = 2'-O-methylcytidine-3'-phosphate
  modified_base 19: mod_base = OTHER; note = 2'-O-methyladenosine-3'-phosphate
  modified_base 20: mod_base = OTHER; note = 2'-O-methyluridine-3'-phosphate
  modified_base 21: mod_base = OTHER; note = 2'-O-methyluridine-3'-phosphorothioate
  modified_base 22: mod_base = OTHER; note = 2'-O-methylguanosine-3'-phosphorothioate
  modified_base 23: mod_base = OTHER; note = 2'-O-methylguanosine
aattttgaagatctgaccattgg

SEQ ID NO: 257 - RNA, 23 nt, synthetic construct
  source 1..23: mol_type = other RNA
  modified_base 5: mod_base = OTHER; note = 5'-methyluridine-3'-phosphate
  modified_base 8: mod_base = OTHER; note = 5'-methyluridine-3'-phosphate
  modified_base 13: mod_base = OTHER; note = 5'-methyluridine-3'-phosphate
  modified_base 15: mod_base = OTHER; note = 5'-methyluridine-3'-phosphate
  modified_base 16: mod_base = OTHER; note = 5'-methyluridine-3'-phosphate
  modified_base 22: mod_base = OTHER; note = 5'-methyluridine-3'-phosphate
  modified_base 23: mod_base = OTHER; note = 5'-methyluridine
ccaatggtcagatcttcaaaatt

SEQ ID NO: 258 - RNA, 21 nt, synthetic construct
  source 1..21: mol_type = other RNA
  modified_base 1: mod_base = OTHER; note = 2'-O-methyladenosine-3'-phosphorothioate
  modified_base 2: mod_base = OTHER; note = 2'-O-methyladenosine-3'-phosphorothioate
  modified_base 3: mod_base = OTHER; note = 2'-O-methyluridine-3'-phosphate
  modified_base 4: mod_base = OTHER; note = 2'-O-methylguanosine-3'-phosphate
  modified_base 5: mod_base = OTHER; note = 2'-O-methylguanosine-3'-phosphate
  modified_base 6: mod_base = OTHER; note = 2'-O-methyluridine-3'-phosphate
  modified_base 7: mod_base = OTHER; note = 2'-O-methylcytidine-3'-phosphate
  modified_base 8: mod_base = OTHER; note = 2'-O-methyladenosine-3'-phosphate
  modified_base 9: mod_base = OTHER; note = 2'-deoxy-2'-fluoroguanosine-3'-phosphate
  modified_base 10: mod_base = OTHER; note = 2'-deoxy-2'-fluoroadenosine-3'-phosphate
  modified_base 11: mod_base = OTHER; note = 2'-deoxy-2'-fluorouridine-3'-phosphate
  modified_base 12: mod_base = OTHER; note = 2'-O-methylcytidine-3'-phosphate
  modified_base 13: mod_base = OTHER; note = 2'-O-methyluridine-3'-phosphate
  modified_base 14: mod_base = OTHER; note = 2'-O-methyluridine-3'-phosphate
  modified_base 15: mod_base = OTHER; note = 2'-O-methylcytidine-3'-phosphate
  modified_base 16: mod_base = OTHER; note = 2'-O-methyladenosine-3'-phosphate
  modified_base 17: mod_base = OTHER; note = 2'-O-methyladenosine-3'-phosphate
  modified_base 18: mod_base = OTHER; note = 2'-O-methyladenosine-3'-phosphate
  modified_base 19: mod_base = OTHER; note = 2'-O-methyladenosine-3'-phosphate
  modified_base 20: mod_base = OTHER; note = 2'-O-methyluridine-3'-phosphate
  modified_base 21: mod_base = OTHER; note = 2'-O-methyluridine-3'-phosphate ((2S,4R)-1-[29-[[2-(acetylamino)-2-deoxy-beta-D-galactopyra nosyl]oxy]-14,14-bis[[3-[[3-[[5-[[2-(acetylamino)-2-deoxy-b eta-D-galactopyranosyl]oxy]-1-oxopentyl]amino]propyl]amino] -3-oxopropoxy]methyl]-1,12,19,25-tetraoxo-16-oxa-13,20,24-t riazanonacos-1-yl]-4-hydroxy-2-pyrrolidinyl)methyl ester
aatggtcagatcttcaaaatt

SEQ ID NO: 259 - RNA, 23 nt, synthetic construct
  source 1..23: mol_type = other RNA
  modified_base 1: mod_base = OTHER; note = 2'-O-methyladenosine-3'-phosphorothioate
  modified_base 2: mod_base = OTHER; note = 2'-deoxy-2'-fluoroadenosine-3'-phosphorothioate
  modified_base 3: mod_base = OTHER; note = 2'-O-methyluridine-3'-phosphate
  modified_base 4: mod_base = OTHER; note = 2'-O-methyluridine-3'-phosphate
  modified_base 5: mod_base = OTHER; note = 2'-O-methyluridine-3'-phosphate
  modified_base 6: mod_base = OTHER; note = 2'-deoxy-2'-fluorouridine-3'-phosphate
  modified_base 7: mod_base = OTHER; note = 2'-O-methylguanosine-3'-phosphate
  modified_base 8: mod_base = OTHER; note = 2'-O-methyladenosine-3'-phosphate
  modified_base 9: mod_base = OTHER; note = 2'-O-methyladenosine-3'-phosphate
  modified_base 10: mod_base = OTHER; note = 2'-O-methylguanosine-3'-phosphate
  modified_base 11: mod_base = OTHER; note = 2'-O-methyladenosine-3'-phosphate
  modified_base 12: mod_base = OTHER; note = 2'-deoxy-2'-fluorouridine-3'-phosphate
  modified_base 13: mod_base = OTHER; note = 2'-O-methylcytidine-3'-phosphate
  modified_base 14: mod_base = OTHER; note = 2'-deoxy-2'-fluorouridine-3'-phosphate
  modified_base 15: mod_base = OTHER; note = 2'-O-methylguanosine-3'-phosphate
  modified_base 16: mod_base = OTHER; note = 2'-deoxy-2'-fluoroadenosine-3'-phosphate
  modified_base 17: mod_base = OTHER; note = 2'-O-methylcytidine-3'-phosphate
  modified_base 18: mod_base = OTHER; note = 2'-O-methylcytidine-3'-phosphate
  modified_base 19: mod_base = OTHER; note = 2'-O-methyladenosine-3'-phosphate
  modified_base 20: mod_base = OTHER; note = 2'-O-methyluridine-3'-phosphate
  modified_base 21: mod_base = OTHER; note = 2'-O-methyluridine-3'-phosphorothioate
  modified_base 22: mod_base = OTHER; note = 2'-O-methylguanosine-3'-phosphorothioate
  modified_base 23: mod_base = OTHER; note = 2'-O-methylguanosine
aattttgaagatctgaccattgg

SEQ ID NO: 260 - RNA, 23 nt, synthetic construct
  source 1..23: mol_type = other RNA
  modified_base 5: mod_base = OTHER; note = 5'-methyluridine-3'-phosphate
  modified_base 8: mod_base = OTHER; note = 5'-methyluridine-3'-phosphate
  modified_base 13: mod_base = OTHER; note = 5'-methyluridine-3'-phosphate
  modified_base 15: mod_base = OTHER; note = 5'-methyluridine-3'-phosphate
  modified_base 16: mod_base = OTHER; note = 5'-methyluridine-3'-phosphate
  modified_base 22: mod_base = OTHER; note = 5'-methyluridine-3'-phosphate
  modified_base 23: mod_base = OTHER; note = 5'-methyluridine
ccaatggtcagatcttcaaaatt

SEQ ID NO: 261 - RNA, 21 nt, synthetic construct
  source 1..21: mol_type = other RNA
  modified_base 1: mod_base = OTHER; note = 2'-O-methyladenosine-3'-phosphorothioate
  modified_base 2: mod_base = OTHER; note = 2'-O-methyladenosine-3'-phosphorothioate
  modified_base 3: mod_base = OTHER; note = 2'-O-methyluridine-3'-phosphate
  modified_base 4: mod_base = OTHER; note = 2'-O-methylguanosine-3'-phosphate
  modified_base 5: mod_base = OTHER; note = 2'-O-methylguanosine-3'-phosphate
  modified_base 6: mod_base = OTHER; note = 2'-O-methyluridine-3'-phosphate
  modified_base 7: mod_base = OTHER; note = 2'-O-methylcytidine-3'-phosphate
  modified_base 8: mod_base = OTHER; note = 2'-O-methyladenosine-3'-phosphate
  modified_base 9: mod_base = OTHER; note = 2'-O-methylguanosine-3'-phosphate
  modified_base 10: mod_base = OTHER; note = 2'-deoxy-2'-fluoroadenosine-3'-phosphate
  modified_base 11: mod_base = OTHER; note = 2'-deoxy-2'-fluorouridine-3'-phosphate
  modified_base 12: mod_base = OTHER; note = 2'-O-methylcytidine-3'-phosphate
  modified_base 13: mod_base = OTHER; note = 2'-O-methyluridine-3'-phosphate
  modified_base 14: mod_base = OTHER; note = 2'-O-methyluridine-3'-phosphate
  modified_base 15: mod_base = OTHER; note = 2'-O-methylcytidine-3'-phosphate
  modified_base 16: mod_base = OTHER; note = 2'-O-methyladenosine-3'-phosphate
  modified_base 17: mod_base = OTHER; note = 2'-O-methyladenosine-3'-phosphate
  modified_base 18: mod_base = OTHER; note = 2'-O-methyladenosine-3'-phosphate
  modified_base 19: mod_base = OTHER; note = 2'-O-methyladenosine-3'-phosphate
  modified_base 20: mod_base = OTHER; note = 2'-O-methyluridine-3'-phosphate
  modified_base 21: mod_base = OTHER; note = 2'-O-methyluridine-3'-phosphate ((2S,4R)-1-[29-[[2-(acetylamino)-2-deoxy-beta-D-galactopyra nosyl]oxy]-14,14-bis[[3-[[3-[[5-[[2-(acetylamino)-2-deoxy-b eta-D-galactopyranosyl]oxy]-1-oxopentyl]amino]propyl]amino] -3-oxopropoxy]methyl]-1,12,19,25-tetraoxo-16-oxa-13,20,24-t riazanonacos-1-yl]-4-hydroxy-2-pyrrolidinyl)methyl ester
aatggtcagatcttcaaaatt

SEQ ID NO: 262 - RNA, 23 nt, synthetic construct
  source 1..23: mol_type = other RNA
  modified_base 1: mod_base = OTHER; note = 2'-O-methyladenosine-3'-phosphorothioate
  modified_base 2: mod_base = OTHER; note = 2'-deoxy-2'-fluoroadenosine-3'-phosphorothioate
  modified_base 3: mod_base = OTHER; note = 2'-O-methyluridine-3'-phosphate
  modified_base 4: mod_base = OTHER; note = 2'-O-methyluridine-3'-phosphate
  modified_base 5: mod_base = OTHER; note = 2'-O-methyluridine-3'-phosphate
  modified_base 6: mod_base = OTHER; note = 2'-deoxy-2'-fluorouridine-3'-phosphate
  modified_base 7: mod_base = OTHER; note = 2'-O-methylguanosine-3'-phosphate
  modified_base 8: mod_base = OTHER; note = 2'-deoxy-2'-fluoroadenosine-3'-phosphate
  modified_base 9: mod_base = OTHER; note = 2'-deoxy-2'-fluoroadenosine-3'-phosphate
  modified_base 10: mod_base = OTHER; note = 2'-O-methylguanosine-3'-phosphate
  modified_base 11: mod_base = OTHER; note = 2'-O-methyladenosine-3'-phosphate
  modified_base 12: mod_base = OTHER; note = 2'-deoxy-2'-fluorouridine-3'-phosphate
  modified_base 13: mod_base = OTHER; note = 2'-O-methylcytidine-3'-phosphate
  modified_base 14: mod_base = OTHER; note = 2'-deoxy-2'-fluorouridine-3'-phosphate
  modified_base 15: mod_base = OTHER; note = 2'-O-methylguanosine-3'-phosphate
  modified_base 16: mod_base = OTHER; note = 2'-deoxy-2'-fluoroadenosine-3'-phosphate
  modified_base 17: mod_base = OTHER; note = 2'-O-methylcytidine-3'-phosphate
  modified_base 18: mod_base = OTHER; note = 2'-O-methylcytidine-3'-phosphate
  modified_base 19: mod_base = OTHER; note = 2'-O-methyladenosine-3'-phosphate
  modified_base 20: mod_base = OTHER; note = 2'-O-methyluridine-3'-phosphate
  modified_base 21: mod_base = OTHER; note = 2'-O-methyluridine-3'-phosphorothioate
  modified_base 22: mod_base = OTHER; note = 2'-O-methylguanosine-3'-phosphorothioate
  modified_base 23: mod_base = OTHER; note = 2'-O-methylguanosine
aattttgaagatctgaccattgg

SEQ ID NO: 263 - RNA, 23 nt, synthetic construct
  source 1..23: mol_type = other RNA
  modified_base 5: mod_base = OTHER; note = 5'-methyluridine-3'-phosphate
  modified_base 8: mod_base = OTHER; note = 5'-methyluridine-3'-phosphate
  modified_base 13: mod_base = OTHER; note = 5'-methyluridine-3'-phosphate
  modified_base 15: mod_base = OTHER; note = 5'-methyluridine-3'-phosphate
  modified_base 16: mod_base = OTHER; note = 5'-methyluridine-3'-phosphate
  modified_base 22: mod_base = OTHER; note = 5'-methyluridine-3'-phosphate
  modified_base 23: mod_base = OTHER; note = 5'-methyluridine
ccaatggtcagatcttcaaaatt

SEQ ID NO: 264 - RNA, 21 nt, synthetic construct
  source 1..21: mol_type = other RNA
  modified_base 1: mod_base = OTHER; note = 2'-O-methyladenosine-3'-phosphorothioate
  modified_base 2: mod_base = OTHER; note = 2'-O-methyladenosine-3'-phosphorothioate
  modified_base 3: mod_base = OTHER; note = 2'-O-methyluridine-3'-phosphate
  modified_base 4: mod_base = OTHER; note = 2'-O-methylguanosine-3'-phosphate
  modified_base 5: mod_base = OTHER; note = 2'-O-methylguanosine-3'-phosphate
  modified_base 6: mod_base = OTHER; note = 2'-O-methyluridine-3'-phosphate
  modified_base 7: mod_base = OTHER; note = 2'-O-methylcytidine-3'-phosphate
  modified_base 8: mod_base = OTHER; note = 2'-O-methyladenosine-3'-phosphate
  modified_base 9: mod_base = OTHER; note = 2'-O-methylguanosine-3'-phosphate
  modified_base 10: mod_base = OTHER; note = 2'-deoxy-2'-fluoroadenosine-3'-phosphate
  modified_base 11: mod_base = OTHER; note = 2'-deoxy-2'-fluorouridine-3'-phosphate
  modified_base 12: mod_base = OTHER; note = 2'-O-methylcytidine-3'-phosphate
  modified_base 13: mod_base = OTHER; note = 2'-O-methyluridine-3'-phosphate
  modified_base 14: mod_base = OTHER; note = 2'-O-methyluridine-3'-phosphate
  modified_base 15: mod_base = OTHER; note = 2'-O-methylcytidine-3'-phosphate
  modified_base 16: mod_base = OTHER; note = 2'-O-methyladenosine-3'-phosphate
  modified_base 17: mod_base = OTHER; note = 2'-O-methyladenosine-3'-phosphate
  modified_base 18: mod_base = OTHER; note = 2'-O-methyladenosine-3'-phosphate
  modified_base 19: mod_base = OTHER; note = 2'-O-methyladenosine-3'-phosphate
  modified_base 20: mod_base = OTHER; note = 2'-O-methyluridine-3'-phosphate
  modified_base 21: mod_base = OTHER; note = 2'-O-methyluridine-3'-phosphate ((2S,4R)-1-[29-[[2-(acetylamino)-2-deoxy-beta-D-galactopyra nosyl]oxy]-14,14-bis[[3-[[3-[[5-[[2-(acetylamino)-2-deoxy-b eta-D-galactopyranosyl]oxy]-1-oxopentyl]amino]propyl]amino] -3-oxopropoxy]methyl]-1,12,19,25-tetraoxo-16-oxa-13,20,24-t riazanonacos-1-yl]-4-hydroxy-2-pyrrolidinyl)methyl ester
aatggtcagatcttcaaaatt

SEQ ID NO: 265 - RNA, 23 nt, synthetic construct
  source 1..23: mol_type = other RNA
  modified_base 1: mod_base = OTHER; note = 2'-O-methyladenosine-3'-phosphorothioate
  modified_base 2: mod_base = OTHER; note = 2'-deoxy-2'-fluoroadenosine-3'-phosphorothioate
  modified_base 3: mod_base = OTHER; note = 2'-O-methyluridine-3'-phosphate
  modified_base 4: mod_base = OTHER; note = 2'-O-methyluridine-3'-phosphate
  modified_base 5: mod_base = OTHER; note = 2'-O-methyluridine-3'-phosphate
  modified_base 6: mod_base = OTHER; note = 2'-deoxy-2'-fluorouridine-3'-phosphate
  modified_base 7: mod_base = OTHER; note = 2'-O-methylguanosine-3'-phosphate
  modified_base 8: mod_base = OTHER; note = 2'-O-methyladenosine-3'-phosphate
  modified_base 9: mod_base = OTHER; note = 2'-O-methyladenosine-3'-phosphate
  modified_base 10: mod_base = OTHER; note = 2'-O-methylguanosine-3'-phosphate
  modified_base 11: mod_base = OTHER; note = 2'-O-methyladenosine-3'-phosphate
  modified_base 12: mod_base = OTHER; note = 2'-deoxy-2'-fluorouridine-3'-phosphate
  modified_base 13: mod_base = OTHER; note = 2'-O-methylcytidine-3'-phosphate
  modified_base 14: mod_base = OTHER; note = 2'-deoxy-2'-fluorouridine-3'-phosphate
  modified_base 15: mod_base = OTHER; note = 2'-O-methylguanosine-3'-phosphate
  modified_base 16: mod_base = OTHER; note = 2'-deoxy-2'-fluoroadenosine-3'-phosphate
  modified_base 17: mod_base = OTHER; note = 2'-O-methylcytidine-3'-phosphate
  modified_base 18: mod_base = OTHER; note = 2'-O-methylcytidine-3'-phosphate
  modified_base 19: mod_base = OTHER; note = 2'-O-methyladenosine-3'-phosphate
  modified_base 20: mod_base = OTHER; note = 2'-O-methyluridine-3'-phosphate
  modified_base 21: mod_base = OTHER; note = 2'-O-methyluridine-3'-phosphorothioate
  modified_base 22: mod_base = OTHER; note = 2'-O-methylguanosine-3'-phosphorothioate
  modified_base 23: mod_base = OTHER; note = 2'-O-methylguanosine
aattttgaagatctgaccattgg

SEQ ID NO: 266 - RNA, 23 nt, synthetic construct
  source 1..23: mol_type = other RNA
  modified_base 5: mod_base = OTHER; note = 5'-methyluridine-3'-phosphate
  modified_base 8: mod_base = OTHER; note = 5'-methyluridine-3'-phosphate
  modified_base 13: mod_base = OTHER; note = 5'-methyluridine-3'-phosphate
  modified_base 15: mod_base = OTHER; note = 5'-methyluridine-3'-phosphate
  modified_base 16: mod_base = OTHER; note = 5'-methyluridine-3'-phosphate
  modified_base 22: mod_base = OTHER; note = 5'-methyluridine-3'-phosphate
  modified_base 23: mod_base = OTHER; note = 5'-methyluridine
ccaatggtcagatcttcaaaatt

SEQ ID NO: 267 - RNA, 21 nt, synthetic construct
  source 1..21: mol_type = other RNA
  modified_base 1: mod_base = OTHER; note = 2'-O-methyladenosine-3'-phosphorothioate
  modified_base 2: mod_base = OTHER; note = 2'-O-methyladenosine-3'-phosphorothioate
  modified_base 3: mod_base = OTHER; note = 2'-O-methyluridine-3'-phosphate
  modified_base 4: mod_base = OTHER; note = 2'-O-methylguanosine-3'-phosphate
  modified_base 5: mod_base = OTHER; note = 2'-O-methylguanosine-3'-phosphate
  modified_base 6: mod_base = OTHER; note = 2'-O-methyluridine-3'-phosphate
  modified_base 7: mod_base = OTHER; note = 2'-deoxy-2'-fluorocytidine-3'-phosphate
  modified_base 8: mod_base = OTHER; note = 2'-O-methyladenosine-3'-phosphate
  modified_base 9: mod_base = OTHER; note = 2'-deoxy-2'-fluoroguanosine-3'-phosphate
  modified_base 10: mod_base = OTHER; note = 2'-deoxy-2'-fluoroadenosine-3'-phosphate
  modified_base 11: mod_base = OTHER; note = 2'-deoxy-2'-fluorouridine-3'-phosphate
  modified_base 12: mod_base = OTHER; note = 2'-O-methylcytidine-3'-phosphate
  modified_base 13: mod_base = OTHER; note = 2'-O-methyluridine-3'-phosphate
  modified_base 14: mod_base = OTHER; note = 2'-O-methyluridine-3'-phosphate
  modified_base 15: mod_base = OTHER; note = 2'-O-methylcytidine-3'-phosphate
  modified_base 16: mod_base = OTHER; note = 2'-O-methyladenosine-3'-phosphate
  modified_base 17: mod_base = OTHER; note = 2'-O-methyladenosine-3'-phosphate
  modified_base 18: mod_base = OTHER; note = 2'-O-methyladenosine-3'-phosphate
  modified_base 19: mod_base = OTHER; note = 2'-O-methyladenosine-3'-phosphate
  modified_base 20: mod_base = OTHER; note = 2'-O-methyluridine-3'-phosphate
  modified_base 21: mod_base = OTHER; note = 2'-O-methyluridine-3'-phosphate ((2S,4R)-1-[29-[[2-(acetylamino)-2-deoxy-beta-D-galactopyra nosyl]oxy]-14,14-bis[[3-[[3-[[5-[[2-(acetylamino)-2-deoxy-b eta-D-galactopyranosyl]oxy]-1-oxopentyl]amino]propyl]amino] -3-oxopropoxy]methyl]-1,12,19,25-tetraoxo-16-oxa-13,20,24-t riazanonacos-1-yl]-4-hydroxy-2-pyrrolidinyl)methyl ester
aatggtcagatcttcaaaatt

SEQ ID NO: 268 - RNA, 23 nt, synthetic construct
  source 1..23: mol_type = other RNA
  modified_base 1: mod_base = OTHER; note = 2'-O-methyladenosine-3'-phosphorothioate
  modified_base 2: mod_base = OTHER; note = 2'-deoxy-2'-fluoroadenosine-3'-phosphorothioate
  modified_base 3: mod_base = OTHER; note = 2'-O-methyluridine-3'-phosphate
  modified_base 4: mod_base = OTHER; note = 2'-O-methyluridine-3'-phosphate
  modified_base 5: mod_base = OTHER; note = 2'-O-methyluridine-3'-phosphate
  modified_base 6: mod_base = OTHER; note = 2'-deoxy-2'-fluorouridine-3'-phosphate
  modified_base 7: mod_base = OTHER; note = 2'-O-methylguanosine-3'-phosphate
  modified_base 8: mod_base = OTHER; note = 2'-O-methyladenosine-3'-phosphate
  modified_base 9: mod_base = OTHER; note = 2'-O-methyladenosine-3'-phosphate
  modified_base 10: mod_base = OTHER; note = 2'-O-methylguanosine-3'-phosphate
  modified_base 11: mod_base = OTHER; note = 2'-O-methyladenosine-3'-phosphate
  modified_base 12: mod_base = OTHER; note = 2'-deoxy-2'-fluorouridine-3'-phosphate
  modified_base 13: mod_base = OTHER; note = 2'-O-methylcytidine-3'-phosphate
  modified_base 14: mod_base = OTHER; note = 2'-deoxy-2'-fluorouridine-3'-phosphate
  modified_base 15: mod_base = OTHER; note = 2'-O-methylguanosine-3'-phosphate
  modified_base 16: mod_base = OTHER; note = 2'-deoxy-2'-fluoroadenosine-3'-phosphate
  modified_base 17: mod_base = OTHER; note = 2'-O-methylcytidine-3'-phosphate
  modified_base 18: mod_base = OTHER; note = 2'-O-methylcytidine-3'-phosphate
  modified_base 19: mod_base = OTHER; note = 2'-O-methyladenosine-3'-phosphate
  modified_base 20: mod_base = OTHER; note = 2'-O-methyluridine-3'-phosphate
  modified_base 21: mod_base = OTHER; note = 2'-O-methyluridine-3'-phosphorothioate
  modified_base 22: mod_base = OTHER; note = 2'-O-methylguanosine-3'-phosphorothioate
  modified_base 23: mod_base = OTHER; note = 2'-O-methyluridine
aattttgaagatctgaccattgt

SEQ ID NO: 269 - RNA, 23 nt, synthetic construct
  source 1..23: mol_type = other RNA
  modified_base 5: mod_base = OTHER; note = 5'-methyluridine-3'-phosphate
  modified_base 8: mod_base = OTHER; note = 5'-methyluridine-3'-phosphate
  modified_base 13: mod_base = OTHER; note = 5'-methyluridine-3'-phosphate
  modified_base 15: mod_base = OTHER; note = 5'-methyluridine-3'-phosphate
  modified_base 16: mod_base = OTHER; note = 5'-methyluridine-3'-phosphate
  modified_base 22: mod_base = OTHER; note = 5'-methyluridine-3'-phosphate
  modified_base 23: mod_base = OTHER; note = 5'-methyluridine
acaatggtcagatcttcaaaatt

SEQ ID NO: 270 - RNA, 21 nt, synthetic construct
  source 1..21: mol_type = other RNA
  modified_base 1: mod_base = OTHER; note = 2'-O-methyladenosine-3'-phosphorothioate
  modified_base 2: mod_base = OTHER; note = 2'-O-methyladenosine-3'-phosphorothioate
  modified_base 3: mod_base = OTHER; note = 2'-O-methyluridine-3'-phosphate
  modified_base 4: mod_base = OTHER; note = 2'-O-methylguanosine-3'-phosphate
  modified_base 5: mod_base = OTHER; note = 2'-O-methylguanosine-3'-phosphate
  modified_base 6: mod_base = OTHER; note = 2'-O-methyluridine-3'-phosphate
  modified_base 7: mod_base = OTHER; note = 2'-deoxy-2'-fluorocytidine-3'-phosphate
  modified_base 8: mod_base = OTHER; note = 2'-O-methyladenosine-3'-phosphate
  modified_base 9: mod_base = OTHER; note = 2'-deoxy-2'-fluoroguanosine-3'-phosphate
  modified_base 10: mod_base = OTHER; note = 2'-deoxy-2'-fluoroadenosine-3'-phosphate
  modified_base 11: mod_base = OTHER; note = 2'-deoxy-2'-fluorouridine-3'-phosphate
  modified_base 12: mod_base = OTHER; note = 2'-O-methylcytidine-3'-phosphate
  modified_base 13: mod_base = OTHER; note = 2'-O-methyluridine-3'-phosphate
  modified_base 14: mod_base = OTHER; note = 2'-O-methyluridine-3'-phosphate
  modified_base 15: mod_base = OTHER; note = 2'-O-methylcytidine-3'-phosphate
  modified_base 16: mod_base = OTHER; note = 2'-O-methyladenosine-3'-phosphate
  modified_base 17: mod_base = OTHER; note = 2'-O-methyladenosine-3'-phosphate
  modified_base 18: mod_base = OTHER; note = 2'-O-methyladenosine-3'-phosphate
  modified_base 19: mod_base = OTHER; note = 2'-O-methyladenosine-3'-phosphate
  modified_base 20: mod_base = OTHER; note = 2'-O-methyluridine-3'-phosphate
  modified_base 21: mod_base = OTHER; note = 2'-O-methyluridine-3'-phosphate ((2S,4R)-1-[29-[[2-(acetylamino)-2-deoxy-beta-D-galactopyra nosyl]oxy]-14,14-bis[[3-[[3-[[5-[[2-(acetylamino)-2-deoxy-b eta-D-galactopyranosyl]oxy]-1-oxopentyl]amino]propyl]amino] -3-oxopropoxy]methyl]-1,12,19,25-tetraoxo-16-oxa-13,20,24-t riazanonacos-1-yl]-4-hydroxy-2-pyrrolidinyl)methyl ester
aatggtcagatcttcaaaatt

SEQ ID NO: 271 - RNA, 23 nt, synthetic construct
  source 1..23: mol_type = other RNA
  modified_base 1: mod_base = OTHER; note = 2'-O-methyladenosine-3'-phosphorothioate
  modified_base 2: mod_base = OTHER; note = 2'-deoxy-2'-fluoroadenosine-3'-phosphorothioate
  modified_base 3: mod_base = OTHER; note = 2'-O-methyluridine-3'-phosphate
  modified_base 4: mod_base = OTHER; note = 2'-O-methyluridine-3'-phosphate
  modified_base 5: mod_base = OTHER; note = 2'-O-methyluridine-3'-phosphate
  modified_base 6: mod_base = OTHER; note = 2'-deoxy-2'-fluorouridine-3'-phosphate
  modified_base 7: mod_base = OTHER; note = 2'-O-methylguanosine-3'-phosphate
  modified_base 8: mod_base = OTHER; note = 2'-O-methyladenosine-3'-phosphate
  modified_base 9: mod_base = OTHER; note = 2'-O-methyladenosine-3'-phosphate
  modified_base 10: mod_base = OTHER; note = 2'-O-methylguanosine-3'-phosphate
  modified_base 11: mod_base = OTHER; note = 2'-O-methyladenosine-3'-phosphate
  modified_base 12: mod_base = OTHER; note = 2'-deoxy-2'-fluorouridine-3'-phosphate
  modified_base 13: mod_base = OTHER; note = 2'-O-methylcytidine-3'-phosphate
  modified_base 14: mod_base = OTHER; note = 2'-deoxy-2'-fluorouridine-3'-phosphate
  modified_base 15: mod_base = OTHER; note = 2'-O-methylguanosine-3'-phosphate
  modified_base 16: mod_base = OTHER; note = 2'-deoxy-2'-fluoroadenosine-3'-phosphate
  modified_base 17: mod_base = OTHER; note = 2'-O-methylcytidine-3'-phosphate
  modified_base 18: mod_base = OTHER; note = 2'-O-methylcytidine-3'-phosphate
  modified_base 19: mod_base = OTHER; note = 2'-O-methyladenosine-3'-phosphate
  modified_base 20: mod_base = OTHER; note = 2'-O-methyluridine-3'-phosphate
  modified_base 21: mod_base = OTHER; note = 2'-O-methyluridine-3'-phosphorothioate
  modified_base 22: mod_base = OTHER; note = 2'-O-methylcytidine-3'-phosphorothioate
  modified_base 23: mod_base = OTHER; note = 2'-O-methyluridine
aattttgaagatctgaccattct

SEQ ID NO: 272 - RNA, 23 nt, synthetic construct
  source 1..23: mol_type = other RNA
  modified_base 5: mod_base = OTHER; note = 5'-methyluridine-3'-phosphate
  modified_base 8: mod_base = OTHER; note = 5'-methyluridine-3'-phosphate
  modified_base 13: mod_base = OTHER; note = 5'-methyluridine-3'-phosphate
  modified_base 15: mod_base = OTHER; note = 5'-methyluridine-3'-phosphate
  modified_base 16: mod_base = OTHER; note = 5'-methyluridine-3'-phosphate
  modified_base 22: mod_base = OTHER; note = 5'-methyluridine-3'-phosphate
  modified_base 23: mod_base = OTHER; note = 5'-methyluridine
agaatggtcagatcttcaaaatt

SEQ ID NO: 273 - RNA, 19 nt, synthetic construct
  source 1..19: mol_type = other RNA
  modified_base 1: mod_base = OTHER; note = 2'-O-methyluridine-3'-phosphorothioate
  modified_base 2: mod_base = OTHER; note = 2'-O-methylguanosine-3'-phosphorothioate
  modified_base 3: mod_base = OTHER; note = 2'-O-methylguanosine-3'-phosphate
  modified_base 4: mod_base = OTHER; note = 2'-O-methyluridine-3'-phosphate
  modified_base 5: mod_base = OTHER; note = 2'-deoxy-2'-fluorocytidine-3'-phosphate
  modified_base 6: mod_base = OTHER; note = 2'-O-methyladenosine-3'-phosphate
  modified_base 7: mod_base = OTHER; note = 2'-deoxy-2'-fluoroguanosine-3'-phosphate
  modified_base 8: mod_base = OTHER; note = 2'-deoxy-2'-fluoroadenosine-3'-phosphate
  modified_base 9: mod_base = OTHER; note = 2'-deoxy-2'-fluorouridine-3'-phosphate
  modified_base 10: mod_base = OTHER; note = 2'-O-methylcytidine-3'-phosphate
  modified_base 11: mod_base = OTHER; note = 2'-O-methyluridine-3'-phosphate
  modified_base 12: mod_base = OTHER; note = 2'-O-methyluridine-3'-phosphate
  modified_base 13: mod_base = OTHER; note = 2'-O-methylcytidine-3'-phosphate
  modified_base 14: mod_base = OTHER; note = 2'-O-methyladenosine-3'-phosphate
  modified_base 15: mod_base = OTHER; note = 2'-O-methyladenosine-3'-phosphate
  modified_base 16: mod_base = OTHER; note = 2'-O-methyladenosine-3'-phosphate
  modified_base 17: mod_base = OTHER; note = 2'-O-methyladenosine-3'-phosphate
  modified_base 18: mod_base = OTHER; note = 2'-O-methyluridine-3'-phosphate
  modified_base 19: mod_base = OTHER; note = 2'-O-methyluridine-3'-phosphate ((2S,4R)-1-[29-[[2-(acetylamino)-2-deoxy-beta-D-galactopyra nosyl]oxy]-14,14-bis[[3-[[3-[[5-[[2-(acetylamino)-2-deoxy-b eta-D-galactopyranosyl]oxy]-1-oxopentyl]amino]propyl]amino] -3-oxopropoxy]methyl]-1,12,19,25-tetraoxo-16-oxa-13,20,24-t riazanonacos-1-yl]-4-hydroxy-2-pyrrolidinyl)methyl ester
tggtcagatcttcaaaatt

SEQ ID NO: 274 - RNA, 21 nt, synthetic construct
  source 1..21: mol_type = other RNA
  modified_base 1: mod_base = OTHER; note = 2'-O-methyladenosine-3'-phosphorothioate
  modified_base 2: mod_base = OTHER; note = 2'-deoxy-2'-fluoroadenosine-3'-phosphorothioate
  modified_base 3: mod_base = OTHER; note = 2'-O-methyluridine-3'-phosphate
  modified_base 4: mod_base = OTHER; note = 2'-O-methyluridine-3'-phosphate
  modified_base 5: mod_base = OTHER; note = 2'-O-methyluridine-3'-phosphate
  modified_base 6: mod_base = OTHER; note = 2'-deoxy-2'-fluorouridine-3'-phosphate
  modified_base 7: mod_base = OTHER; note = 2'-O-methylguanosine-3'-phosphate
  modified_base 8: mod_base = OTHER; note = 2'-O-methyladenosine-3'-phosphate
  modified_base 9: mod_base = OTHER; note = 2'-O-methyladenosine-3'-phosphate
  modified_base 10: mod_base = OTHER; note = 2'-O-methylguanosine-3'-phosphate
  modified_base 11: mod_base = OTHER; note = 2'-O-methyladenosine-3'-phosphate
  modified_base 12: mod_base = OTHER; note = 2'-deoxy-2'-fluorouridine-3'-phosphate
  modified_base 13: mod_base = OTHER; note = 2'-O-methylcytidine-3'-phosphate
  modified_base 14: mod_base = OTHER; note = 2'-deoxy-2'-fluorouridine-3'-phosphate
  modified_base 15: mod_base = OTHER; note = 2'-O-methylguanosine-3'-phosphate
  modified_base 16: mod_base = OTHER; note = 2'-deoxy-2'-fluoroadenosine-3'-phosphate
  modified_base 17: mod_base = OTHER; note = 2'-O-methylcytidine-3'-phosphate
  modified_base 18: mod_base = OTHER; note = 2'-O-methylcytidine-3'-phosphate
  modified_base 19: mod_base = OTHER; note = 2'-O-methyladenosine-3'-phosphorothioate
  modified_base 20: mod_base = OTHER; note = 2'-O-methyluridine-3'-phosphorothioate
  modified_base 21: mod_base = OTHER; note = 2'-O-methyluridine
aattttgaagatctgaccatt

SEQ ID NO: 275 - RNA, 21 nt, synthetic construct
  source 1..21: mol_type = other RNA
  modified_base 3: mod_base = OTHER; note = 5'-methyluridine-3'-phosphate
  modified_base 6: mod_base = OTHER; note = 5'-methyluridine-3'-phosphate
  modified_base 11: mod_base = OTHER; note = 5'-methyluridine-3'-phosphate
  modified_base 13: mod_base = OTHER; note = 5'-methyluridine-3'-phosphate
  modified_base 14: mod_base = OTHER; note = 5'-methyluridine-3'-phosphate
  modified_base 20: mod_base = OTHER; note = 5'-methyluridine-3'-phosphate
  modified_base 21: mod_base = OTHER; note = 5'-methyluridine
aatggtcagatcttcaaaatt

SEQ ID NO: 276 - RNA, 21 nt, synthetic construct
  source 1..21: mol_type = other RNA
catgtgcacattgaaaactgt

SEQ ID NO: 277 - RNA, 23 nt, synthetic construct
  source 1..23: mol_type = other RNA
  modified_base 7: mod_base = OTHER; note = 5'-methyluridine-3'-phosphate
acagttttcaatgtgcacatgcg

SEQ ID NO: 278 - RNA, 21 nt, synthetic construct
  source 1..21: mol_type = other RNA
catgtgcacattgaaaactgt

SEQ ID NO: 279 - RNA, 23 nt, synthetic construct
  source 1..23: mol_type = other RNA
  modified_base 7: mod_base = OTHER; note = 5'-methyluridine-3'-phosphate
acagttttcaatgtgcacatggg

SEQ ID NO: 280 - RNA, 21 nt, synthetic construct
  source 1..21: mol_type = other RNA
catgtgcacattgaaaactgt

SEQ ID NO: 281 - RNA, 23 nt, synthetic construct
  source 1..23: mol_type = other RNA
  modified_base 7: mod_base = OTHER; note = 5'-methyluridine-3'-phosphate
acagttttcaatgtgcacatggt

SEQ ID NO: 282 - RNA, 19 nt, synthetic construct
  source 1..19: mol_type = other RNA
tgtgcacattgaaaactgt

SEQ ID NO: 283 - RNA, 21 nt, synthetic construct
  source 1..21: mol_type = other RNA
  modified_base 7: mod_base = OTHER; note = 5'-methyluridine-3'-phosphate
acagttttcaatgtgcacatg

SEQ ID NO: 284 - RNA, 21 nt, synthetic construct
  source 1..21: mol_type = other RNA
catgtgcacattgaaaactgt

SEQ ID NO: 285 - RNA, 23 nt, synthetic construct
  source 1..23: mol_type = other RNA
  modified_base 7: mod_base = OTHER; note = 5'-methyluridine-3'-phosphate
acagttttcaatgtgcacatgcg

SEQ ID NO: 286 - RNA, 21 nt, synthetic construct
  source 1..21: mol_type = other RNA
catgtgcacattgaaaactgt

SEQ ID NO: 287 - RNA, 23 nt, synthetic construct
  source 1..23: mol_type = other RNA
  modified_base 7: mod_base = OTHER; note = 5'-methyluridine-3'-phosphate
acagttttcaatgtgcacatgcg

SEQ ID NO: 288 - RNA, 21 nt, synthetic construct
  source 1..21: mol_type = other RNA
catgtgcacattgaaaactgt

SEQ ID NO: 289 - RNA, 23 nt, synthetic construct
  source 1..23: mol_type = other RNA
  modified_base 7: mod_base = OTHER; note = 5'-methyluridine-3'-phosphate
acagttttcaatgtgcacatgcg

SEQ ID NO: 290 - RNA, 21 nt, synthetic construct
  source 1..21: mol_type = other RNA
catgtgcacattgaaaactgt

SEQ ID NO: 291 - RNA, 23 nt, synthetic construct
  source 1..23: mol_type = other RNA
  modified_base 7: mod_base = OTHER; note = 5'-methyluridine-3'-phosphate
acagttttcaatgtgcacatgcg

SEQ ID NO: 292 - RNA, 21 nt, synthetic construct
  source 1..21: mol_type = other RNA
catgtgcacattgaaaactgt

SEQ ID NO: 293 - RNA, 23 nt, synthetic construct
  source 1..23: mol_type = other RNA
  modified_base 7: mod_base = OTHER; note = 5'-methyluridine-3'-phosphate
acagttttcaatgtgcacatgcg

SEQ ID NO: 294 - RNA, 21 nt, synthetic construct
  source 1..21: mol_type = other RNA
atggtcagatcttcaaaataa

SEQ ID NO: 295 - RNA, 23 nt, synthetic construct
  source 1..23: mol_type = other RNA
  modified_base 7: mod_base = OTHER; note = 5'-methyluridine-3'-phosphate
ttattttgaagatctgaccattg

SEQ ID NO: 296 - RNA, 21 nt, synthetic construct
  source 1..21: mol_type = other RNA
atggtcagatcttcaaaataa

SEQ ID NO: 297 - RNA, 23 nt, synthetic construct
  source 1..23: mol_type = other RNA
  modified_base 7: mod_base = OTHER; note = 5'-methyluridine-3'-phosphate
ttattttgaagatctgaccatgg

SEQ ID NO: 298 - RNA, 21 nt, synthetic construct
  source 1..21: mol_type = other RNA
atggtcagatcttcaaaataa

SEQ ID NO: 299 - RNA, 23 nt, synthetic construct
  source 1..23: mol_type = other RNA
  modified_base 7: mod_base = OTHER; note = 5'-methyluridine-3'-phosphate
ttattttgaagatctgaccatgt

SEQ ID NO: 300 - RNA, 19 nt, synthetic construct
  source 1..19: mol_type = other RNA
ggtcagatcttcaaaataa

SEQ ID NO: 301 - RNA, 21 nt, synthetic construct
  source 1..21: mol_type = other RNA
  modified_base 7: mod_base = OTHER; note = 5'-methyluridine-3'-phosphate
ttattttgaagatctgaccat

SEQ ID NO: 302 - RNA, 21 nt, synthetic construct
  source 1..21: mol_type = other RNA
atggtcagatcttcaaaataa

SEQ ID NO: 303 - RNA, 23 nt, synthetic construct
  source 1..23: mol_type = other RNA
  modified_base 7: mod_base = OTHER; note = 5'-methyluridine-3'-phosphate
ttattttgaagatctgaccattg

SEQ ID NO: 304 - RNA, 21 nt, synthetic construct
  source 1..21: mol_type = other RNA
atggtcagatcttcaaaataa

SEQ ID NO: 305 - RNA, 23 nt, synthetic construct
  source 1..23: mol_type = other RNA
  modified_base 7: mod_base = OTHER; note = 5'-methyluridine-3'-phosphate
ttattttgaagatctgaccattg

SEQ ID NO: 306 - RNA, 21 nt, synthetic construct
  source 1..21: mol_type = other RNA
atggtcagatcttcaaaataa

SEQ ID NO: 307 - RNA, 23 nt, synthetic construct
  source 1..23: mol_type = other RNA
  modified_base 7: mod_base = OTHER; note = 5'-methyluridine-3'-phosphate
ttattttgaagatctgaccattg

SEQ ID NO: 308 - RNA, 21 nt, synthetic construct
  source 1..21: mol_type = other RNA
atggtcagatcttcaaaataa

SEQ ID NO: 309 - RNA, 23 nt, synthetic construct
  source 1..23: mol_type = other RNA
  modified_base 7: mod_base = OTHER; note = 5'-methyluridine-3'-phosphate
ttattttgaagatctgaccattg

SEQ ID NO: 310 - RNA, 21 nt, synthetic construct
  source 1..21: mol_type = other RNA
atggtcagatcttcaaaataa

SEQ ID NO: 311 - RNA, 23 nt, synthetic construct
  source 1..23: mol_type = other RNA
  modified_base 7: mod_base = OTHER; note = 5'-methyluridine-3'-phosphate
ttattttgaagatctgaccattg

SEQ ID NO: 312 - RNA, 21 nt, synthetic construct
  source 1..21: mol_type = other RNA
atggtcagatcttcaaaatat

SEQ ID NO: 313 - RNA, 23 nt, synthetic construct
  source 1..23: mol_type = other RNA
  modified_base 7: mod_base = OTHER; note = 5'-methyluridine-3'-phosphate
atattttgaagatctgaccattg

SEQ ID NO: 314 - RNA, 21 nt, synthetic construct
  source 1..21: mol_type = other RNA
atggtcagatcttcaaaatat

SEQ ID NO: 315 - RNA, 23 nt, synthetic construct
  source 1..23: mol_type = other RNA
  modified_base 7: mod_base = OTHER; note = 5'-methyluridine-3'-phosphate
atattttgaagatctgaccatgg

SEQ ID NO: 316 - RNA, 21 nt, synthetic construct
  source 1..21: mol_type = other RNA
atggtcagatcttcaaaatat

SEQ ID NO: 317 - RNA, 23 nt, synthetic construct
  source 1..23: mol_type = other RNA
  modified_base 7: mod_base = OTHER; note = 5'-methyluridine-3'-phosphate
atattttgaagatctgaccatgt

SEQ ID NO: 318 - RNA, 19 nt, synthetic construct
  source 1..19: mol_type = other RNA
ggtcagatcttcaaaatat

SEQ ID NO: 319 - RNA, 21 nt, synthetic construct
  source 1..21: mol_type = other RNA
  modified_base 7: mod_base = OTHER; note = 5'-methyluridine-3'-phosphate
atattttgaagatctgaccat

SEQ ID NO: 320 - RNA, 21 nt, synthetic construct
  source 1..21: mol_type = other RNA
atggtcagatcttcaaaatat

SEQ ID NO: 321 - RNA, 23 nt, synthetic construct
  source 1..23: mol_type = other RNA
  modified_base 7: mod_base = OTHER; note = 5'-methyluridine-3'-phosphate
atattttgaagatctgaccattg

SEQ ID NO: 322 - RNA, 21 nt, synthetic construct
  source 1..21: mol_type = other RNA
atggtcagatcttcaaaatat

SEQ ID NO: 323 - RNA, 23 nt, synthetic construct
  source 1..23: mol_type = other RNA
  modified_base 7: mod_base = OTHER; note = 5'-methyluridine-3'-phosphate
atattttgaagatctgaccattg

SEQ ID NO: 324 - RNA, 21 nt, synthetic construct
  source 1..21: mol_type = other RNA
atggtcagatcttcaaaatat

SEQ ID NO: 325 - RNA, 23 nt, synthetic construct
  source 1..23: mol_type = other RNA
  modified_base 7: mod_base = OTHER; note = 5'-methyluridine-3'-phosphate
atattttgaagatctgaccattg

SEQ ID NO: 326 - RNA, 21 nt, synthetic construct
  source 1..21: mol_type = other RNA
atggtcagatcttcaaaatat

SEQ ID NO: 327 - RNA, 23 nt, synthetic construct
  source 1..23: mol_type = other RNA
  modified_base 7: mod_base = OTHER; note = 5'-methyluridine-3'-phosphate
atattttgaagatctgaccattg

SEQ ID NO: 328 - RNA, 21 nt, synthetic construct
  source 1..21: mol_type = other RNA
atggtcagatcttcaaaatat

SEQ ID NO: 329 - RNA, 23 nt, synthetic construct
  source 1..23: mol_type = other RNA
  modified_base 7: mod_base = OTHER; note = 5'-methyluridine-3'-phosphate
atattttgaagatctgaccattg

SEQ ID NO: 330 - RNA, 21 nt, synthetic construct
  source 1..21: mol_type = other RNA
ggtcagatcttcaaaataaaa

SEQ ID NO: 331 - RNA, 23 nt, synthetic construct
  source 1..23: mol_type = other RNA
ttttattttgaagatctgaccat

SEQ ID NO: 332 - RNA, 21 nt, synthetic construct
  source 1..21: mol_type = other RNA
ggtcagatcttcaaaataaaa

SEQ ID NO: 333 - RNA, 23 nt, synthetic construct
  source 1..23: mol_type = other RNA
ttttattttgaagatctgaccgt

SEQ ID NO: 334 - RNA, 21 nt, synthetic construct
  source 1..21: mol_type = other RNA
ggtcagatcttcaaaataaaa

SEQ ID NO: 335 - RNA, 23 nt, synthetic construct
  source 1..23: mol_type = other RNA
ttttattttgaagatctgaccct

SEQ ID NO: 336 - RNA, 21 nt, synthetic construct
  source 1..21: mol_type = other RNA
ggtcagatcttcaaaataaaa

SEQ ID NO: 337 - RNA, 23 nt, synthetic construct
  source 1..23: mol_type = other RNA
ttttattttgaagatctgaccgg

SEQ ID NO: 338 - RNA, 19 nt, synthetic construct
  source 1..19: mol_type = other RNA
tcagatcttcaaaataaaa

SEQ ID NO: 339 - RNA, 21 nt, synthetic construct
  source 1..21: mol_type = other RNA
ttttattttgaagatctgacc

SEQ ID NO: 340 - RNA, 21 nt, synthetic construct
  source 1..21: mol_type = other RNA
ggtcagatcttcaaaataaaa

SEQ ID NO: 341 - RNA, 23 nt, synthetic construct
  source 1..23: mol_type = other RNA
ttttattttgaagatctgaccat

SEQ ID NO: 342 - RNA, 21 nt, synthetic construct
  source 1..21: mol_type = other RNA
ggtcagatcttcaaaataaaa

SEQ ID NO: 343 - RNA, 23 nt, synthetic construct
  source 1..23: mol_type = other RNA
ttttattttgaagatctgaccat

SEQ ID NO: 344 - RNA, 21 nt, synthetic construct
  source 1..21: mol_type = other RNA
ggtcagatcttcaaaataaaa

SEQ ID NO: 345 - RNA, 23 nt, synthetic construct
  source 1..23: mol_type = other RNA
ttttattttgaagatctgaccat

SEQ ID NO: 346 - RNA, 21 nt, synthetic construct
  source 1..21: mol_type = other RNA
ggtcagatcttcaaaataaaa

SEQ ID NO: 347 - RNA, 23 nt, synthetic construct
  source 1..23: mol_type = other RNA
ttttattttgaagatctgaccat

SEQ ID NO: 348 - RNA, 21 nt, synthetic construct
  source 1..21: mol_type = other RNA
ggtcagatcttcaaaataaaa

SEQ ID NO: 349 - RNA, 23 nt, synthetic construct
  source 1..23: mol_type = other RNA
ttttattttgaagatctgaccat

SEQ ID NO: 350 - RNA, 21 nt, synthetic construct
  source 1..21: mol_type = other RNA
ggtcagatcttcaaaataaaa

SEQ ID NO: 351 - RNA, 23 nt, synthetic construct
  source 1..23: mol_type = other RNA
ttttattttgaagatctgaccat

SEQ ID NO: 352 - RNA, 21 nt, synthetic construct
  source 1..21: mol_type = other RNA
ggtcagatcttcaaaataaaa

SEQ ID NO: 353 - RNA, 23 nt, synthetic construct
  source 1..23: mol_type = other RNA
ttttattttgaagatctgaccat

SEQ ID NO: 354 - RNA, 21 nt, synthetic construct
  source 1..21: mol_type = other RNA
ggtcagatcttcaaaataaaa

SEQ ID NO: 355 - RNA, 23 nt, synthetic construct
  source 1..23: mol_type = other RNA
ttttattttgaagatctgaccat

SEQ ID NO: 356 - RNA, 21 nt, synthetic construct
  source 1..21: mol_type = other RNA
ggtcagatcttcaaaataaaa

SEQ ID NO: 357 - RNA, 23 nt, synthetic construct
  source 1..23: mol_type = other RNA
ttttattttgaagatctgaccgt

SEQ ID NO: 358 - RNA, 21 nt, synthetic construct
  source 1..21: mol_type = other RNA
ggtcagatcttcaaaataaaa

SEQ ID NO: 359 - RNA, 23 nt, synthetic construct
  source 1..23: mol_type = other RNA
ttttattttgaagatctgaccct

SEQ ID NO: 360 - RNA, 21 nt, synthetic construct
  source 1..21: mol_type = other RNA
ggtcagatcttcaaaataaaa

SEQ ID NO: 361 - RNA, 23 nt, synthetic construct
  source 1..23: mol_type = other RNA
ttttattttgaagatctgaccgg

SEQ ID NO: 362 - RNA, 19 nt, synthetic construct
  source 1..19: mol_type = other RNA
tcagatcttcaaaataaaa

SEQ ID NO: 363 - RNA, 21 nt, synthetic construct
  source 1..21: mol_type = other RNA
ttttattttgaagatctgacc

SEQ ID NO: 364 - RNA, 21 nt, synthetic construct
  source 1..21: mol_type = other RNA
ggtcagatcttcaaaataaat

SEQ ID NO: 365 - RNA, 23 nt, synthetic construct
  source 1..23: mol_type = other RNA
atttattttgaagatctgaccat

SEQ ID NO: 366 - RNA, 21 nt, synthetic construct
  source 1..21: mol_type = other RNA
ggtcagatcttcaaaataaat

SEQ ID NO: 367 - RNA, 23 nt, synthetic construct
  source 1..23: mol_type = other RNA
atttattttgaagatctgaccgt

SEQ ID NO: 368 - RNA, 21 nt, synthetic construct
  source 1..21: mol_type = other RNA
ggtcagatcttcaaaataaat

SEQ ID NO: 369 - RNA, 23 nt, synthetic construct
  source 1..23: mol_type = other RNA
atttattttgaagatctgaccct

SEQ ID NO: 370 - RNA, 21 nt, synthetic construct
  source 1..21: mol_type = other RNA
ggtcagatcttcaaaataaat

SEQ ID NO: 371 - RNA, 23 nt, synthetic construct
  source 1..23: mol_type = other RNA
atttattttgaagatctgaccgg

SEQ ID NO: 372 - RNA, 19 nt, synthetic construct
  source 1..19: mol_type = other RNA
tcagatcttcaaaataaat

SEQ ID NO: 373 - RNA, 21 nt, synthetic construct
  source 1..21: mol_type = other RNA
atttattttgaagatctgacc

SEQ ID NO: 374 - RNA, 21 nt, synthetic construct
  source 1..21: mol_type = other RNA
ggtcagatcttcaaaataaat

SEQ ID NO: 375 - RNA, 23 nt, synthetic construct
  source 1..23: mol_type = other RNA
atttattttgaagatctgaccat

SEQ ID NO: 376 - RNA, 21 nt, synthetic construct
  source 1..21: mol_type = other RNA
ggtcagatcttcaaaataaat

SEQ ID NO: 377 - RNA, 23 nt, synthetic construct
  source 1..23: mol_type = other RNA
atttattttgaagatctgaccat

SEQ ID NO: 378 - RNA, 21 nt, synthetic construct
  source 1..21: mol_type = other RNA
ggtcagatcttcaaaataaat

SEQ ID NO: 379 - RNA, 23 nt, synthetic construct
  source 1..23: mol_type = other RNA
atttattttgaagatctgaccat

SEQ ID NO: 380 - RNA, 21 nt, synthetic construct
  source 1..21: mol_type = other RNA
ggtcagatcttcaaaataaat

SEQ ID NO: 381 - RNA, 23 nt, synthetic construct
  source 1..23: mol_type = other RNA
atttattttgaagatctgaccat

SEQ ID NO: 382 - RNA, 21 nt, synthetic construct
  source 1..21: mol_type = other RNA
ggtcagatcttcaaaataaat

SEQ ID NO: 383 - RNA, 23 nt, synthetic construct
  source 1..23: mol_type = other RNA
atttattttgaagatctgaccat

SEQ ID NO: 384 - RNA, 21 nt, synthetic construct
  source 1..21: mol_type = other RNA
ggtcagatcttcaaaataaat

SEQ ID NO: 385 - RNA, 23 nt, synthetic construct
  source 1..23: mol_type = other RNA
atttattttgaagatctgaccat

SEQ ID NO: 386 - RNA, 21 nt, synthetic construct
  source 1..21: mol_type = other RNA
ggtcagatcttcaaaataaat

SEQ ID NO: 387 - RNA, 23 nt, synthetic construct
  source 1..23: mol_type = other RNA
atttattttgaagatctgaccat

SEQ ID NO: 388 - RNA, 21 nt, synthetic construct
  source 1..21: mol_type = other RNA
ggtcagatcttcaaaataaat

SEQ ID NO: 389 - RNA, 23 nt, synthetic construct
  source 1..23: mol_type = other RNA
atttattttgaagatctgaccat

SEQ ID NO: 390 - RNA, 21 nt, synthetic construct
  source 1..21: mol_type = other RNA
ggtcagatcttcaaaataaat

SEQ ID NO: 391 - RNA, 23 nt, synthetic construct
  source 1..23: mol_type = other RNA
atttattttgaagatctgaccgt

SEQ ID NO: 392 - RNA, 21 nt, synthetic construct
  source 1..21: mol_type = other RNA
ggtcagatcttcaaaataaat

SEQ ID NO: 393 - RNA, 23 nt, synthetic construct
  source 1..23: mol_type = other RNA
atttattttgaagatctgaccct

SEQ ID NO: 394 - RNA, 21 nt, synthetic construct
  source 1..21: mol_type = other RNA
ggtcagatcttcaaaataaat

SEQ ID NO: 395 - RNA, 23 nt, synthetic construct
  source 1..23: mol_type = other RNA
atttattttgaagatctgaccgg

SEQ ID NO: 396 - RNA, 19 nt, synthetic construct
  source 1..19: mol_type = other RNA
tcagatcttcaaaataaat

SEQ ID NO: 397 - RNA, 21 nt, synthetic construct
  source 1..21: mol_type = other RNA
atttattttgaagatctgacc

SEQ ID NO: 398 - RNA, 21 nt, synthetic construct
  source 1..21: mol_type = other RNA
aatggtcagatcttcaaaata

SEQ ID NO: 399 - RNA, 23 nt, synthetic construct
  source 1..23: mol_type = other RNA
tattttgaagatctgaccattgg

SEQ ID NO: 400 - RNA, 21 nt, synthetic construct
  source 1..21: mol_type = other RNA
aatggtcagatcttcaaaata

SEQ ID NO: 401 - RNA, 23 nt, synthetic construct
  source 1..23: mol_type = other RNA
tattttgaagatctgaccattgt

SEQ ID NO: 402 - RNA, 21 nt, synthetic construct
  source 1..21: mol_type = other RNA
aatggtcagatcttcaaaata

SEQ ID NO: 403 - RNA, 23 nt, synthetic construct
  source 1..23: mol_type = other RNA
tattttgaagatctgaccattct

SEQ ID NO: 404 - RNA, 19 nt, synthetic construct
  source 1..19: mol_type = other RNA
tggtcagatcttcaaaata

SEQ ID NO: 405 - RNA, 21 nt, synthetic construct
  source 1..21: mol_type = other RNA
tattttgaagatctgaccatt

SEQ ID NO: 406 - RNA, 21 nt, synthetic construct
  source 1..21: mol_type = other RNA
aatggtcagatcttcaaaata

SEQ ID NO: 407 - RNA, 23 nt, synthetic construct
  source 1..23: mol_type = other RNA
tattttgaagatctgaccattgg

SEQ ID NO: 408 - RNA, 21 nt, synthetic construct
  source 1..21: mol_type = other RNA
aatggtcagatcttcaaaata

SEQ ID NO: 409 - RNA, 23 nt, synthetic construct
  source 1..23: mol_type = other RNA
tattttgaagatctgaccattgg

SEQ ID NO: 410 - RNA, 21 nt, synthetic construct
  source 1..21: mol_type = other RNA
aatggtcagatcttcaaaata

SEQ ID NO: 411 - RNA, 23 nt, synthetic construct
  source 1..23: mol_type = other RNA
tattttgaagatctgaccattgg

SEQ ID NO: 412 - RNA, 21 nt, synthetic construct
  source 1..21: mol_type = other RNA
aatggtcagatcttcaaaata

SEQ ID NO: 413 - RNA, 23 nt, synthetic construct
  source 1..23: mol_type = other RNA
tattttgaagatctgaccattgg

SEQ ID NO: 414 - RNA, 21 nt, synthetic construct
  source 1..21: mol_type = other RNA
aatggtcagatcttcaaaata

SEQ ID NO: 415 - RNA, 23 nt, synthetic construct
  source 1..23: mol_type = other RNA
tattttgaagatctgaccattgg

SEQ ID NO: 416 - RNA, 21 nt, synthetic construct
  source 1..21: mol_type = other RNA
aatggtcagatcttcaaaata

SEQ ID NO: 417 - RNA, 23 nt, synthetic construct
  source 1..23: mol_type = other RNA
tattttgaagatctgaccattgg

SEQ ID NO: 418 - RNA, 21 nt, synthetic construct
  source 1..21: mol_type = other RNA
aatggtcagatcttcaaaata

SEQ ID NO: 419 - RNA, 23 nt, synthetic construct
  source 1..23: mol_type = other RNA
tattttgaagatctgaccattgg

SEQ ID NO: 420 - RNA, 21 nt, synthetic construct
  source 1..21: mol_type = other RNA
aatggtcagatcttcaaaata

SEQ ID NO: 421 - RNA, 23 nt, synthetic construct
  source 1..23: mol_type = other RNA
tattttgaagatctgaccattgg

SEQ ID NO: 422 - RNA, 21 nt, synthetic construct
  source 1..21: mol_type = other RNA
aatggtcagatcttcaaaata

SEQ ID NO: 423 - RNA, 23 nt, synthetic construct
  source 1..23: mol_type = other RNA
tattttgaagatctgaccattgt

SEQ ID NO: 424 - RNA, 21 nt, synthetic construct
  source 1..21: mol_type = other RNA
aatggtcagatcttcaaaata

SEQ ID NO: 425 - RNA, 23 nt, synthetic construct
  source 1..23: mol_type = other RNA
tattttgaagatctgaccattct

SEQ ID NO: 426 - RNA, 19 nt, synthetic construct
  source 1..19: mol_type = other RNA
tggtcagatcttcaaaata

SEQ ID NO: 427 - RNA, 21 nt, synthetic construct
  source 1..21: mol_type = other RNA
tattttgaagatctgaccatt

SEQ ID NO: 428 - RNA, 21 nt, synthetic construct
  source 1..21: mol_type = other RNA
aatggtcagatcttcaaaatt

SEQ ID NO: 429 - RNA, 23 nt, synthetic construct
  source 1..23: mol_type = other RNA
aattttgaagatctgaccattgg

SEQ ID NO: 430 - RNA, 21 nt, synthetic construct
  source 1..21: mol_type = other RNA
aatggtcagatcttcaaaatt

SEQ ID NO: 431 - RNA, 23 nt, synthetic construct
  source 1..23: mol_type = other RNA
aattttgaagatctgaccattgt

SEQ ID NO: 432 - RNA, 21 nt, synthetic construct
  source 1..21: mol_type = other RNA
aatggtcagatcttcaaaatt

SEQ ID NO: 433 - RNA, 23 nt, synthetic construct
  source 1..23: mol_type = other RNA
aattttgaagatctgaccattct

SEQ ID NO: 434 - RNA, 19 nt, synthetic construct
  source 1..19: mol_type = other RNA
tggtcagatcttcaaaatt

SEQ ID NO: 435 - RNA, 21 nt, synthetic construct
  source 1..21: mol_type = other RNA
aattttgaagatctgaccatt

SEQ ID NO: 436 - RNA, 21 nt, synthetic construct
  source 1..21: mol_type = other RNA
aatggtcagatcttcaaaatt

SEQ ID NO: 437 - RNA, 23 nt, synthetic construct
  source 1..23: mol_type = other RNA
aattttgaagatctgaccattgg

SEQ ID NO: 438 - RNA, 21 nt, synthetic construct
  source 1..21: mol_type = other RNA
aatggtcagatcttcaaaatt

SEQ ID NO: 439 - RNA, 23 nt, synthetic construct
  source 1..23: mol_type = other RNA
aattttgaagatctgaccattgg

SEQ ID NO: 440 - RNA, 21 nt, synthetic construct
  source 1..21: mol_type = other RNA
aatggtcagatcttcaaaatt

SEQ ID NO: 441 - RNA, 23 nt, synthetic construct
  source 1..23: mol_type = other RNA
aattttgaagatctgaccattgg

SEQ ID NO: 442 - RNA, 21 nt, synthetic construct
  source 1..21: mol_type = other RNA
aatggtcagatcttcaaaatt

SEQ ID NO: 443 - RNA, 23 nt, synthetic construct
  source 1..23: mol_type = other RNA
aattttgaagatctgaccattgg

SEQ ID NO: 444 - RNA, 21 nt, synthetic construct
  source 1..21: mol_type = other RNA
aatggtcagatcttcaaaatt

SEQ ID NO: 445 - RNA, 23 nt, synthetic construct
  source 1..23: mol_type = other RNA
aattttgaagatctgaccattgg

SEQ ID NO: 446 - RNA, 21 nt, synthetic construct
  source 1..21: mol_type = other RNA
aatggtcagatcttcaaaatt

SEQ ID NO: 447 - RNA, 23 nt, synthetic construct
  source 1..23: mol_type = other RNA
aattttgaagatctgaccattgg

SEQ ID NO: 448 - RNA, 21 nt, synthetic construct
  source 1..21: mol_type = other RNA
aatggtcagatcttcaaaatt

SEQ ID NO: 449 - RNA, 23 nt, synthetic construct
  source 1..23: mol_type = other RNA
aattttgaagatctgaccattgg

SEQ ID NO: 450 - RNA, 21 nt, synthetic construct
  source 1..21: mol_type = other RNA
aatggtcagatcttcaaaatt

SEQ ID NO: 451 - RNA, 23 nt, synthetic construct
  source 1..23: mol_type = other RNA
aattttgaagatctgaccattgg

SEQ ID NO: 452 - RNA, 21 nt, synthetic construct
  source 1..21: mol_type = other RNA
aatggtcagatcttcaaaatt

SEQ ID NO: 453 - RNA, 23 nt, synthetic construct
  source 1..23: mol_type = other RNA
aattttgaagatctgaccattgt

SEQ ID NO: 454 - RNA, 21 nt, synthetic construct
  source 1..21: mol_type = other RNA
aatggtcagatcttcaaaatt

SEQ ID NO: 455 - RNA, 23 nt, synthetic construct
  source 1..23: mol_type = other RNA
aattttgaagatctgaccattct

SEQ ID NO: 456 - RNA, 19 nt, synthetic construct
  source 1..19: mol_type = other RNA
tggtcagatcttcaaaatt

SEQ ID NO: 457 - RNA, 21 nt, synthetic construct
  source 1..21: mol_type = other RNA
aattttgaagatctgaccatt

SEQ ID NO: 458 - RNA, 21 nt, synthetic construct
  source 1..21: mol_type = other RNA
  modified_base 1: mod_base = OTHER; note = 2'-O-methyladenosine-3'-phosphorothioate
  modified_base 2: mod_base = OTHER; note = 2'-O-methyluridine-3'-phosphorothioate
  modified_base 3: mod_base = OTHER; note = 2'-O-methylguanosine-3'-phosphate
  modified_base 4: mod_base = OTHER; note = 2'-O-methylguanosine-3'-phosphate
  modified_base 5: mod_base = OTHER; note = 2'-O-methyluridine-3'-phosphate
  modified_base 6: mod_base = OTHER; note = 2'-O-methylcytidine-3'-phosphate
  modified_base 7: mod_base = OTHER; note = 2'-deoxy-2'-fluoroadenosine-3'-phosphate
  modified_base 8: mod_base = OTHER; note = 2'-O-methylguanosine-3'-phosphate
  modified_base 9: mod_base = OTHER; note = 2'-deoxy-2'-fluoroadenosine-3'-phosphate
  modified_base 10: mod_base = OTHER; note = 2'-deoxy-2'-fluorouridine-3'-phosphate
  modified_base 11: mod_base = OTHER; note = 2'-deoxy-2'-fluorocytidine-3'-phosphate
  modified_base 12: mod_base = OTHER; note = 2'-O-methyluridine-3'-phosphate
  modified_base 13: mod_base = OTHER; note = 2'-O-methyluridine-3'-phosphate
  modified_base 14: mod_base = OTHER; note = 2'-O-hexadecyl-cytidine-3'-phosphate
  modified_base 15: mod_base = OTHER; note = 2'-O-methyladenosine-3'-phosphate
  modified_base 16: mod_base = OTHER; note = 2'-O-methyladenosine-3'-phosphate
  modified_base 17: mod_base = OTHER; note = 2'-O-methyladenosine-3'-phosphate
  modified_base 18: mod_base = OTHER; note = 2'-O-methyladenosine-3'-phosphate
  modified_base 19: mod_base = OTHER; note = 2'-O-methyluridine-3'-phosphate
  modified_base 20: mod_base = OTHER; note = 2'-O-methyladenosine-3'-phosphate
  modified_base 21: mod_base = OTHER; note = 2'-O-methyladenosine-3'-phosphate ((2S,4R)-1-[29-[[2-(acetylamino)-2-deoxy-beta-D-galactopyra nosyl]oxy]-14,14-bis[[3-[[3-[[5-[[2-(acetylamino)-2-deoxy-b eta-D-galactopyranosyl]oxy]-1-oxopentyl]amino]propyl]amino] -3-oxopropoxy]methyl]-1,12,19,25-tetraoxo-16-oxa-13,20,24-t riazanonacos-1-yl]-4-hydroxy-2-pyrrolidinyl)methyl ester
atggtcagatcttcaaaataa

SEQ ID NO: 459 - RNA, 23 nt, synthetic construct
  source 1..23: mol_type = other RNA
  modified_base 1: mod_base = OTHER; note = 2'-O-methyluridine-3'-phosphorothioate
  modified_base 2: mod_base = OTHER; note = 2'-deoxy-2'-fluorouridine-3'-phosphorothioate
  modified_base 3: mod_base = OTHER; note = 2'-O-methyladenosine-3'-phosphate
  modified_base 4: mod_base = OTHER; note = 2'-O-methyluridine-3'-phosphate
  modified_base 5: mod_base = OTHER; note = 2'-O-methyluridine-3'-phosphate
  modified_base 6: mod_base = OTHER; note = 2'-deoxy-2'-fluorouridine-3'-phosphate
  modified_base 7: mod_base = OTHER; note = 2'-O-methyluridine-3'-phosphate
  modified_base 8: mod_base = OTHER; note = 2'-deoxy-2'-fluoroguanosine-3'-phosphate
  modified_base 9: mod_base = OTHER; note = 2'-deoxy-2'-fluoroadenosine-3'-phosphate
  modified_base 10: mod_base = OTHER; note = 2'-O-methyladenosine-3'-phosphate
  modified_base 11: mod_base = OTHER; note = 2'-O-methylguanosine-3'-phosphate
  modified_base 12: mod_base = OTHER; note = 2'-O-methyladenosine-3'-phosphate
  modified_base 13: mod_base = OTHER; note = 2'-O-methyluridine-3'-phosphate
  modified_base 14: mod_base = OTHER; note = 2'-deoxy-2'-fluorocytidine-3'-phosphate
  modified_base 15: mod_base = OTHER; note = 2'-O-methyluridine-3'-phosphate
  modified_base 16: mod_base = OTHER; note = 2'-deoxy-2'-fluoroguanosine-3'-phosphate
  modified_base 17: mod_base = OTHER; note = 2'-O-methyladenosine-3'-phosphate
  modified_base 18: mod_base = OTHER; note = 2'-O-methylcytidine-3'-phosphate
  modified_base 19: mod_base = OTHER; note = 2'-O-methylcytidine-3'-phosphate
  modified_base 20: mod_base = OTHER; note = 2'-O-methyladenosine-3'-phosphate
  modified_base 21: mod_base = OTHER; note = 2'-O-methyluridine-3'-phosphorothioate
  modified_base 22: mod_base = OTHER; note = 2'-O-methyluridine-3'-phosphorothioate
  modified_base 23: mod_base = OTHER; note = 2'-O-methylguanosine
ttattttgaagatctgaccattg

SEQ ID NO: 460 - RNA, 23 nt, synthetic construct
  source 1..23: mol_type = other RNA
  modified_base 4: mod_base = OTHER; note = 5'-methyluridine-3'-phosphate
  modified_base 7: mod_base = OTHER; note = 5'-methyluridine-3'-phosphate
  modified_base 12: mod_base = OTHER; note = 5'-methyluridine-3'-phosphate
  modified_base 14: mod_base = OTHER; note = 5'-methyluridine-3'-phosphate
  modified_base 15: mod_base = OTHER; note = 5'-methyluridine-3'-phosphate
  modified_base 21: mod_base = OTHER; note = 5'-methyluridine-3'-phosphate
caatggtcagatcttcaaaataa

SEQ ID NO: 461 - RNA, 21 nt, synthetic construct
  source 1..21: mol_type = other RNA
  modified_base 1: mod_base = OTHER; note = 2'-O-methyluridine-3'-phosphorothioate
  modified_base 2: mod_base = OTHER; note = 2'-O-methyluridine-3'-phosphorothioate
  modified_base 3: mod_base = OTHER; note = 2'-deoxy-2'-fluoroguanosine-3'-phosphate
  modified_base 4: mod_base = OTHER; note = 2'-O-methyluridine-3'-phosphate
  modified_base 5: mod_base = OTHER; note = 2'-deoxy-2'-fluoroguanosine-3'-phosphate
  modified_base 6: mod_base = OTHER; note = 2'-O-methyluridine-3'-phosphate
  modified_base 7: mod_base = OTHER; note = 2'-deoxy-2'-fluorocytidine-3'-phosphate
  modified_base 8: mod_base = OTHER; note = 2'-O-methyladenosine-3'-phosphate
  modified_base 9: mod_base = OTHER; note = 2'-deoxy-2'-fluoroadenosine-3'-phosphate
  modified_base 10: mod_base = OTHER; note = 2'-deoxy-2'-fluoroadenosine-3'-phosphate
  modified_base 11: mod_base = OTHER; note = 2'-deoxy-2'-fluoroadenosine-3'-phosphate
  modified_base 12: mod_base = OTHER; note = 2'-O-methyluridine-3'-phosphate
  modified_base 13: mod_base = OTHER; note = 2'-deoxy-2'-fluoroguanosine-3'-phosphate
  modified_base 14: mod_base = OTHER; note = 2'-O-methyluridine-3'-phosphate
  modified_base 15: mod_base = OTHER; note = 2'-deoxy-2'-fluorouridine-3'-phosphate
  modified_base 16: mod_base = OTHER; note = 2'-O-methylcytidine-3'-phosphate
  modified_base 17: mod_base = OTHER; note = 2'-deoxy-2'-fluorouridine-3'-phosphate
  modified_base 18: mod_base = OTHER; note = 2'-O-methyladenosine-3'-phosphate
  modified_base 19: mod_base = OTHER; note = 2'-deoxy-2'-fluorocytidine-3'-phosphate
  modified_base 20: mod_base = OTHER; note = 2'-O-methyladenosine-3'-phosphate
  modified_base 21: mod_base = OTHER; note = 2'-O-methyluridine-3'-phosphate ((2S,4R)-1-[29-[[2-(acetylamino)-2-deoxy-beta-D-galactopyra nosyl]oxy]-14,14-bis[[3-[[3-[[5-[[2-(acetylamino)-2-deoxy-b eta-D-galactopyranosyl]oxy]-1-oxopentyl]amino]propyl]amino] -3-oxopropoxy]methyl]-1,12,19,25-tetraoxo-16-oxa-13,20,24-t riazanonacos-1-yl]-4-hydroxy-2-pyrrolidinyl)methyl ester
ttgtgtcaaaatgttctacat

SEQ ID NO: 462 - RNA, 23 nt, synthetic construct
  source 1..23: mol_type = other RNA
  modified_base 1: mod_base = OTHER; note = 2'-O-methyladenosine-3'-phosphorothioate
  modified_base 2: mod_base = OTHER; note = 2'-deoxy-2'-fluorouridine-3'-phosphorothioate
  modified_base 3: mod_base = OTHER; note = 2'-O-methylguanosine-3'-phosphate
  modified_base 4: mod_base = OTHER; note = 2'-deoxy-2'-fluorouridine-3'-phosphate
  modified_base 5: mod_base = OTHER; note = 2'-O-methyladenosine-3'-phosphate
  modified_base 6: mod_base = OTHER; note = 2'-deoxy-2'-fluoroguanosine-3'-phosphate
  modified_base 7: mod_base = OTHER; note = 2'-O-methyladenosine-3'-phosphate
  modified_base 8: mod_base = OTHER; note = 2'-deoxy-2'-fluoroadenosine-3'-phosphate
  modified_base 9: mod_base = OTHER; note = 2'-O-methylcytidine-3'-phosphate
  modified_base 10: mod_base = OTHER; note = 2'-deoxy-2'-fluoroadenosine-3'-phosphate
  modified_base 11: mod_base = OTHER; note = 2'-O-methyluridine-3'-phosphate
  modified_base 12: mod_base = OTHER; note = 2'-deoxy-2'-fluorouridine-3'-phosphate
  modified_base 13: mod_base = OTHER; note = 2'-O-methyluridine-3'-phosphate
  modified_base 14: mod_base = OTHER; note = 2'-deoxy-2'-fluorouridine-3'-phosphate
  modified_base 15: mod_base = OTHER; note = 2'-O-methylguanosine-3'-phosphate
  modified_base 16: mod_base = OTHER; note = 2'-deoxy-2'-fluoroadenosine-3'-phosphate
  modified_base 17: mod_base = OTHER; note = 2'-O-methylcytidine-3'-phosphate
  modified_base 18: mod_base = OTHER; note = 2'-deoxy-2'-fluoroadenosine-3'-phosphate
  modified_base 19: mod_base = OTHER; note = 2'-O-methylcytidine-3'-phosphate
  modified_base 20: mod_base = OTHER; note = 2'-deoxy-2'-fluoroadenosine-3'-phosphate
  modified_base 21: mod_base = OTHER; note = 2'-O-methyladenosine-3'-phosphorothioate
  modified_base 22: mod_base = OTHER; note = 2'-O-methyladenosine-3'-phosphorothioate
  modified_base 23: mod_base = OTHER; note = 2'-O-methyladenosine
atgtagaacattttgacacaaaa

SEQ ID NO: 463 - RNA, 23 nt, synthetic construct
  source 1..23: mol_type = other RNA
  modified_base 1: mod_base = OTHER; note = 5'-methyluridine-3'-phosphate
  modified_base 2: mod_base = OTHER; note = 5'-methyluridine-3'-phosphate
  modified_base 3: mod_base = OTHER; note = 5'-methyluridine-3'-phosphate
  modified_base 4: mod_base = OTHER; note = 5'-methyluridine-3'-phosphate
  modified_base 6: mod_base = OTHER; note = 5'-methyluridine-3'-phosphate
  modified_base 8: mod_base = OTHER; note = 5'-methyluridine-3'-phosphate
  modified_base 14: mod_base = OTHER; note = 5'-methyluridine-3'-phosphate
  modified_base 16: mod_base = OTHER; note = 5'-methyluridine-3'-phosphate
  modified_base 17: mod_base = OTHER; note = 5'-methyluridine-3'-phosphate
  modified_base 19: mod_base = OTHER; note = 5'-methyluridine-3'-phosphate
  modified_base 23: mod_base = OTHER; note = 5'-methyluridine
ttttgtgtcaaaatgttctacat

SEQ ID NO: 464 - RNA, 21 nt, synthetic construct
  source 1..21: mol_type = other RNA
  modified_base 1: mod_base = OTHER; note = 2'-O-methyladenosine-3'-phosphorothioate
  modified_base 2: mod_base = OTHER; note = 2'-O-methyluridine-3'-phosphorothioate
  modified_base 3: mod_base = OTHER; note = 2'-O-methylguanosine-3'-phosphate
  modified_base 4: mod_base = OTHER; note = 2'-O-methylguanosine-3'-phosphate
  modified_base 5: mod_base = OTHER; note = 2'-O-methyluridine-3'-phosphate
  modified_base 6: mod_base = OTHER; note = 2'-O-hexadecyl-cytidine-3'-phosphate
  modified_base 7: mod_base = OTHER; note = 2'-deoxy-2'-fluoroadenosine-3'-phosphate
  modified_base 8: mod_base = OTHER; note = 2'-O-methylguanosine-3'-phosphate
  modified_base 9: mod_base = OTHER; note = 2'-deoxy-2'-fluoroadenosine-3'-phosphate
  modified_base 10: mod_base = OTHER; note = 2'-deoxy-2'-fluorouridine-3'-phosphate
  modified_base 11: mod_base = OTHER; note = 2'-deoxy-2'-fluorocytidine-3'-phosphate
  modified_base 12: mod_base = OTHER; note = 2'-O-methyluridine-3'-phosphate
  modified_base 13: mod_base = OTHER; note = 2'-O-methyluridine-3'-phosphate
  modified_base 14: mod_base = OTHER; note = 2'-O-methylcytidine-3'-phosphate
  modified_base 15: mod_base = OTHER; note = 2'-O-methyladenosine-3'-phosphate
  modified_base 16: mod_base = OTHER; note = 2'-O-methyladenosine-3'-phosphate
  modified_base 17: mod_base = OTHER; note = 2'-O-methyladenosine-3'-phosphate
  modified_base 18: mod_base = OTHER; note = 2'-O-methyladenosine-3'-phosphate
  modified_base 19: mod_base = OTHER; note = 2'-O-methyluridine-3'-phosphate
  modified_base 20: mod_base = OTHER; note = 2'-O-methyladenosine-3'-phosphate
  modified_base 21: mod_base = OTHER; note = 2'-O-methyladenosine-3'-phosphate ((2S,4R)-1-[29-[[2-(acetylamino)-2-deoxy-beta-D-galactopyra nosyl]oxy]-14,14-bis[[3-[[3-[[5-[[2-(acetylamino)-2-deoxy-b eta-D-galactopyranosyl]oxy]-1-oxopentyl]amino]propyl]amino] -3-oxopropoxy]methyl]-1,12,19,25-tetraoxo-16-oxa-13,20,24-t riazanonacos-1-yl]-4-hydroxy-2-pyrrolidinyl)methyl ester
atggtcagatcttcaaaataa

SEQ ID NO: 465 - RNA, 23 nt, synthetic construct
  source 1..23: mol_type = other RNA
  modified_base 1: mod_base = OTHER; note = 2'-O-methyluridine-3'-phosphorothioate
  modified_base 2: mod_base = OTHER; note = 2'-deoxy-2'-fluorouridine-3'-phosphorothioate
  modified_base 3: mod_base = OTHER; note = 2'-O-methyladenosine-3'-phosphate
  modified_base 4: mod_base = OTHER; note = 2'-O-methyluridine-3'-phosphate
  modified_base 5: mod_base = OTHER; note = 2'-O-methyluridine-3'-phosphate
  modified_base 6: mod_base = OTHER; note = 2'-deoxy-2'-fluorouridine-3'-phosphate
  modified_base 7: mod_base = OTHER; note = 2'-O-methyluridine-3'-phosphate
  modified_base 8: mod_base = OTHER; note = 2'-deoxy-2'-fluoroguanosine-3'-phosphate
  modified_base 9: mod_base = OTHER; note = 2'-deoxy-2'-fluoroadenosine-3'-phosphate
  modified_base 10: mod_base = OTHER; note = 2'-O-methyladenosine-3'-phosphate
  modified_base 11: mod_base = OTHER; note = 2'-O-methylguanosine-3'-phosphate
  modified_base 12: mod_base = OTHER; note = 2'-O-methyladenosine-3'-phosphate
  modified_base 13: mod_base = OTHER; note = 2'-O-methyluridine-3'-phosphate
  modified_base 14: mod_base = OTHER; note = 2'-deoxy-2'-fluorocytidine-3'-phosphate
  modified_base 15: mod_base = OTHER; note = 2'-O-methyluridine-3'-phosphate
  modified_base 16: mod_base = OTHER; note = 2'-deoxy-2'-fluoroguanosine-3'-phosphate
  modified_base 17: mod_base = OTHER; note = 2'-O-methyladenosine-3'-phosphate
  modified_base 18: mod_base = OTHER; note = 2'-O-methylcytidine-3'-phosphate
  modified_base 19: mod_base = OTHER; note = 2'-O-methylcytidine-3'-phosphate
  modified_base 20: mod_base = OTHER; note = 2'-O-methyladenosine-3'-phosphate
  modified_base 21: mod_base = OTHER; note = 2'-O-methyluridine-3'-phosphorothioate
  modified_base 22: mod_base = OTHER; note = 2'-O-methyluridine-3'-phosphorothioate
  modified_base 23: mod_base = OTHER; note = 2'-O-methylguanosine
ttattttgaagatctgaccattg

SEQ ID NO: 466 - RNA, 23 nt, synthetic construct
  source 1..23: mol_type = other RNA
  modified_base 4: mod_base = OTHER; note = 5'-methyluridine-3'-phosphate
  modified_base 7: mod_base = OTHER; note = 5'-methyluridine-3'-phosphate
  modified_base 12: mod_base = OTHER; note = 5'-methyluridine-3'-phosphate
  modified_base 14: mod_base = OTHER; note = 5'-methyluridine-3'-phosphate
  modified_base 15: mod_base = OTHER; note = 5'-methyluridine-3'-phosphate
  modified_base 21: mod_base = OTHER; note = 5'-methyluridine-3'-phosphate
caatggtcagatcttcaaaataa

SEQ ID NO: 467 - RNA, 21 nt, synthetic construct
  source 1..21: mol_type = other RNA
  modified_base 1: mod_base = OTHER; note = 2'-O-methyluridine-3'-phosphorothioate
  modified_base 2: mod_base = OTHER; note = 2'-O-methyluridine-3'-phosphorothioate
  modified_base 3: mod_base = OTHER; note = 2'-O-methylguanosine-3'-phosphate
  modified_base 4: mod_base = OTHER; note = 2'-O-hexadecyl-uridine-3'-phosphate
  modified_base 5: mod_base = OTHER; note = 2'-deoxy-2'-fluoroguanosine-3'-phosphate
  modified_base 6: mod_base = OTHER; note = 2'-O-methyluridine-3'-phosphate
  modified_base 7: mod_base = OTHER; note = 2'-deoxy-2'-fluorocytidine-3'-phosphate
  modified_base 8: mod_base = OTHER; note = 2'-O-methyladenosine-3'-phosphate
  modified_base 9: mod_base = OTHER; note = 2'-deoxy-2'-fluoroadenosine-3'-phosphate
  modified_base 10: mod_base = OTHER; note = 2'-O-methyladenosine-3'-phosphate
  modified_base 11: mod_base = OTHER; note = 2'-deoxy-2'-fluoroadenosine-3'-phosphate
  modified_base 12: mod_base = OTHER; note = 2'-deoxy-2'-fluorouridine-3'-phosphate
  modified_base 13: mod_base = OTHER; note = 2'-O-methylguanosine-3'-phosphate
  modified_base 14: mod_base = OTHER; note = 2'-O-methyluridine-3'-phosphate
  modified_base 15: mod_base = OTHER; note = 2'-O-methyluridine-3'-phosphate
  modified_base 16: mod_base = OTHER; note = 2'-O-methylcytidine-3'-phosphate
  modified_base 17: mod_base = OTHER; note = 2'-O-methyluridine-3'-phosphate
  modified_base 18: mod_base = OTHER; note = 2'-O-methyladenosine-3'-phosphate
  modified_base 19: mod_base = OTHER; note = 2'-deoxy-2'-fluorocytidine-3'-phosphate
  modified_base 20: mod_base = OTHER; note = 2'-O-methyladenosine-3'-phosphate
  modified_base 21: mod_base = OTHER; note = 2'-deoxy-2'-fluorouridine-3'-phosphate ((2S,4R)-1-[29-[[2-(acetylamino)-2-deoxy-beta-D-galactopyra nosyl]oxy]-14,14-bis[[3-[[3-[[5-[[2-(acetylamino)-2-deoxy-b eta-D-galactopyranosyl]oxy]-1-oxopentyl]amino]propyl]amino] -3-oxopropoxy]methyl]-1,12,19,25-tetraoxo-16-oxa-13,20,24-t riazanonacos-1-yl]-4-hydroxy-2-pyrrolidinyl)methyl ester
ttgtgtcaaaatgttctacat

SEQ ID NO: 468 - RNA, 23 nt, synthetic construct
  source 1..23: mol_type = other RNA
  modified_base 1: mod_base = OTHER; note = 2'-O-methyladenosine-3'-phosphorothioate
  modified_base 2: mod_base = OTHER; note = 2'-deoxy-2'-fluorouridine-3'-phosphorothioate
  modified_base 3: mod_base = OTHER; note = 2'-O-methylguanosine-3'-phosphate
  modified_base 4: mod_base = OTHER; note = 2'-O-methyluridine-3'-phosphate
  modified_base 5: mod_base = OTHER; note = 2'-deoxy-2'-fluoroadenosine-3'-phosphate
  modified_base 6: mod_base = OTHER; note = 2'-deoxy-2'-fluoroguanosine-3'-phosphate
  modified_base 7: mod_base = OTHER; note = 2'-O-methyladenosine-3'-phosphate
  modified_base 8: mod_base = OTHER; note = 2'-deoxy-2'-fluoroadenosine-3'-phosphate
  modified_base 9: mod_base = OTHER; note = 2'-O-methylcytidine-3'-phosphate
  modified_base 10: mod_base = OTHER; note = 2'-O-methyladenosine-3'-phosphate
  modified_base 11: mod_base = OTHER; note = 2'-O-methyluridine-3'-phosphate
  modified_base 12: mod_base = OTHER; note = 2'-deoxy-2'-fluorouridine-3'-phosphate
  modified_base 13: mod_base = OTHER; note = 2'-O-methyluridine-3'-phosphate
  modified_base 14: mod_base = OTHER; note = 2'-deoxy-2'-fluorouridine-3'-phosphate
  modified_base 15: mod_base = OTHER; note = 2'-O-methylguanosine-3'-phosphate
  modified_base 16: mod_base = OTHER; note = 2'-deoxy-2'-fluoroadenosine-3'-phosphate
  modified_base 17: mod_base = OTHER; note = 2'-O-methylcytidine-3'-phosphate
  modified_base 18: mod_base = OTHER; note = 2'-O-methyladenosine-3'-phosphate
  modified_base 19: mod_base = OTHER; note = 2'-O-methylcytidine-3'-phosphate
  modified_base 20: mod_base = OTHER; note = 2'-O-methyladenosine-3'-phosphate
  modified_base 21: mod_base = OTHER; note = 2'-O-methyladenosine-3'-phosphorothioate
  modified_base 22: mod_base = OTHER; note = 2'-O-methyladenosine-3'-phosphorothioate
  modified_base 23: mod_base = OTHER; note = 2'-O-methyladenosine
atgtagaacattttgacacaaaa

SEQ ID NO: 469 - RNA, 23 nt, synthetic construct
  source 1..23: mol_type = other RNA
  modified_base 1: mod_base = OTHER; note = 5'-methyluridine-3'-phosphate
  modified_base 2: mod_base = OTHER; note = 5'-methyluridine-3'-phosphate
  modified_base 3: mod_base = OTHER; note = 5'-methyluridine-3'-phosphate
  modified_base 4: mod_base = OTHER; note = 5'-methyluridine-3'-phosphate
  modified_base 6: mod_base = OTHER; note = 5'-methyluridine-3'-phosphate
  modified_base 8: mod_base = OTHER; note = 5'-methyluridine-3'-phosphate
  modified_base 14: mod_base = OTHER; note = 5'-methyluridine-3'-phosphate
  modified_base 16: mod_base = OTHER; note = 5'-methyluridine-3'-phosphate
  modified_base 17: mod_base = OTHER; note = 5'-methyluridine-3'-phosphate
  modified_base 19: mod_base = OTHER; note = 5'-methyluridine-3'-phosphate
  modified_base 23: mod_base = OTHER; note = 5'-methyluridine
ttttgtgtcaaaatgttctacat

SEQ ID NO: 470 - RNA, 21 nt, synthetic construct
  source 1..21: mol_type = other RNA
  modified_base 1: mod_base = OTHER; note = 2'-O-methyladenosine-3'-phosphorothioate
  modified_base 2: mod_base = OTHER; note = 2'-O-methyluridine-3'-phosphorothioate
  modified_base 3: mod_base = OTHER; note = 2'-O-methylguanosine-3'-phosphate
  modified_base 4: mod_base = OTHER; note = 2'-O-methylguanosine-3'-phosphate
  modified_base 5: mod_base = OTHER; note = 2'-O-methyluridine-3'-phosphate
  modified_base 6: mod_base = OTHER; note = 2'-O-methylcytidine-3'-phosphate
  modified_base 7: mod_base = OTHER; note = 2'-deoxy-2'-fluoroadenosine-3'-phosphate
  modified_base 8: mod_base = OTHER; note = 2'-O-methylguanosine-3'-phosphate
  modified_base 9: mod_base = OTHER; note = 2'-deoxy-2'-fluoroadenosine-3'-phosphate
  modified_base 10: mod_base = OTHER; note = 2'-deoxy-2'-fluorouridine-3'-phosphate
  modified_base 11: mod_base = OTHER; note = 2'-deoxy-2'-fluorocytidine-3'-phosphate
  modified_base 12: mod_base = OTHER; note = 2'-O-methyluridine-3'-phosphate
  modified_base 13: mod_base = OTHER; note = 2'-O-methyluridine-3'-phosphate
  modified_base 14: mod_base = OTHER; note = 2'-O-methylcytidine-3'-phosphate
  modified_base 15: mod_base = OTHER; note = 2'-O-methyladenosine-3'-phosphate
  modified_base 16: mod_base = OTHER; note = 2'-O-methyladenosine-3'-phosphate
  modified_base 17: mod_base = OTHER; note = 2'-O-methyladenosine-3'-phosphate
  modified_base 18: mod_base = OTHER; note = 2'-O-methyladenosine-3'-phosphate
  modified_base 19: mod_base = OTHER; note = 2'-O-methyluridine-3'-phosphate
  modified_base 20: mod_base = OTHER; note = 2'-O-methyladenosine-3'-phosphate
  modified_base 21: mod_base = OTHER; note = 2'-O-methyladenosine-3'-phosphate ((2S,4R)-1-[29-[[2-(acetylamino)-2-deoxy-beta-D-galactopyra nosyl]oxy]-14,14-bis[[3-[[3-[[5-[[2-(acetylamino)-2-deoxy-b eta-D-galactopyranosyl]oxy]-1-oxopentyl]amino]propyl]amino] -3-oxopropoxy]methyl]-1,12,19,25-tetraoxo-16-oxa-13,20,24-t riazanonacos-1-yl]-4-hydroxy-2-pyrrolidinyl)methyl ester
atggtcagatcttcaaaataa

SEQ ID NO: 471 - RNA, 23 nt, synthetic construct
  source 1..23: mol_type = other RNA
  modified_base 1: mod_base = OTHER; note = 2'-O-methyluridine-3'-phosphorothioate
  modified_base 2: mod_base = OTHER; note = 2'-deoxy-2'-fluorouridine-3'-phosphorothioate
  modified_base 3: mod_base = OTHER; note = 2'-O-methyladenosine-3'-phosphate
  modified_base 4: mod_base = OTHER; note = 2'-O-methyluridine-3'-phosphate
  modified_base 5: mod_base = OTHER; note = 2'-O-methyluridine-3'-phosphate
  modified_base 6: mod_base = OTHER; note = 2'-deoxy-2'-fluorouridine-3'-phosphate
  modified_base 7: mod_base = OTHER; note = 2'-O-methyluridine-3'-phosphate
  modified_base 8: mod_base = OTHER; note = 2'-deoxy-2'-fluoroguanosine-3'-phosphate
  modified_base 9: mod_base = OTHER; note = 2'-deoxy-2'-fluoroadenosine-3'-phosphate
  modified_base 10: mod_base = OTHER; note = 2'-O-methyladenosine-3'-phosphate
  modified_base 11: mod_base = OTHER; note = 2'-O-methylguanosine-3'-phosphate
  modified_base 12: mod_base = OTHER; note = 2'-O-methyladenosine-3'-phosphate
  modified_base 13: mod_base = OTHER; note = 2'-O-methyluridine-3'-phosphate
  modified_base 14: mod_base = OTHER; note = 2'-deoxy-2'-fluorocytidine-3'-phosphate
  modified_base 15: mod_base = OTHER; note = 2'-O-methyluridine-3'-phosphate
  modified_base 16: mod_base = OTHER; note = 2'-deoxy-2'-fluoroguanosine-3'-phosphate
  modified_base 17: mod_base = OTHER; note = 2'-O-methyladenosine-3'-phosphate
  modified_base 18: mod_base = OTHER; note = 2'-O-methylcytidine-3'-phosphate
  modified_base 19: mod_base = OTHER; note = 2'-O-methylcytidine-3'-phosphate
  modified_base 20: mod_base = OTHER; note = 2'-O-methyladenosine-3'-phosphate
  modified_base 21: mod_base = OTHER; note = 2'-O-methyluridine-3'-phosphorothioate
  modified_base 22: mod_base = OTHER; note = 2'-O-methyluridine-3'-phosphorothioate
  modified_base 23: mod_base = OTHER; note = 2'-O-methylguanosine
ttattttgaagatctgaccattg

SEQ ID NO: 472 - RNA, 23 nt, synthetic construct
  source 1..23: mol_type = other RNA
  modified_base 4: mod_base = OTHER; note = 5'-methyluridine-3'-phosphate
  modified_base 7: mod_base = OTHER; note = 5'-methyluridine-3'-phosphate
  modified_base 12: mod_base = OTHER; note = 5'-methyluridine-3'-phosphate
  modified_base 14: mod_base = OTHER; note = 5'-methyluridine-3'-phosphate
  modified_base 15: mod_base = OTHER; note = 5'-methyluridine-3'-phosphate
  modified_base 21: mod_base = OTHER; note = 5'-methyluridine-3'-phosphate
caatggtcagatcttcaaaataa

SEQ ID NO: 473 - RNA, 21 nt, synthetic construct
  source 1..21: mol_type = other RNA
  modified_base 1: mod_base = OTHER; note = 2'-O-methylcytidine-3'-phosphorothioate
  modified_base 2: mod_base = OTHER; note = 2'-O-methyladenosine-3'-phosphorothioate
  modified_base 3: mod_base = OTHER; note = 2'-O-methyluridine-3'-phosphate
  modified_base 4: mod_base = OTHER; note = 2'-O-methylguanosine-3'-phosphate
  modified_base 5: mod_base = OTHER; note = 2'-O-methyluridine-3'-phosphate
  modified_base 6: mod_base = OTHER; note = 2'-O-methylguanosine-3'-phosphate
  modified_base 7: mod_base = OTHER; note = 2'-deoxy-2'-fluorocytidine-3'-phosphate
  modified_base 8: mod_base = OTHER; note = 2'-O-methyladenosine-3'-phosphate
  modified_base 9: mod_base = OTHER; note = 2'-deoxy-2'-fluorocytidine-3'-phosphate
  modified_base 10: mod_base = OTHER; note = 2'-deoxy-2'-fluoroadenosine-3'-phosphate
  modified_base 11: mod_base = OTHER; note = 2'-deoxy-2'-fluorouridine-3'-phosphate
  modified_base 12: mod_base = OTHER; note = 2'-O-methyluridine-3'-phosphate
  modified_base 13: mod_base = OTHER; note = 2'-O-methylguanosine-3'-phosphate
  modified_base 14: mod_base = OTHER; note = 2'-O-methyladenosine-3'-phosphate
  modified_base 15: mod_base = OTHER; note = 2'-O-methyladenosine-3'-phosphate
  modified_base 16: mod_base = OTHER; note = 2'-O-methyladenosine-3'-phosphate
  modified_base 17: mod_base = OTHER; note = 2'-O-methyladenosine-3'-phosphate
  modified_base 18: mod_base = OTHER; note = 2'-O-methylcytidine-3'-phosphate
  modified_base 19: mod_base = OTHER; note = 2'-O-methyluridine-3'-phosphate
  modified_base 20: mod_base = OTHER; note = 2'-O-methylguanosine-3'-phosphate
  modified_base 21: mod_base = OTHER; note = 3'-O-methyluridine-2'-phosphate ((2S,4R)-1-[29-[[2-(acetylamino)-2-deoxy-beta-D-galactopyra nosyl]oxy]-14,14-bis[[3-[[3-[[5-[[2-(acetylamino)-2-deoxy-b eta-D-galactopyranosyl]oxy]-1-oxopentyl]amino]propyl]amino] -3-oxopropoxy]methyl]-1,12,19,25-tetraoxo-16-oxa-13,20,24-t riazanonacos-1-yl]-4-hydroxy-2-pyrrolidinyl)methyl ester
catgtgcacattgaaaactgt

SEQ ID NO: 474 - RNA, 23 nt, synthetic construct
  source 1..23: mol_type = other RNA
  modified_base 1: mod_base = OTHER; note = 2'-O-methyladenosine-3'-phosphorothioate
  modified_base 2: mod_base = OTHER; note = 2'-deoxy-2'-fluorocytidine-3'-phosphorothioate
  modified_base 3: mod_base = OTHER; note = 2'-O-methyladenosine-3'-phosphate
  modified_base 4: mod_base = OTHER; note = 2'-O-methylguanosine-3'-phosphate
  modified_base 5: mod_base = OTHER; note = 2'-O-methyluridine-3'-phosphate
  modified_base 6: mod_base = OTHER; note = 2'-deoxy-2'-fluorouridine-3'-phosphate
  modified_base 7: mod_base = OTHER; note = 2'-O-methyluridine-3'-phosphate
  modified_base 8: mod_base = OTHER; note = 2'-deoxy-2'-fluorouridine-3'-phosphate
  modified_base 9: mod_base = OTHER; note = 2'-deoxy-2'-fluorocytidine-3'-phosphate
  modified_base 10: mod_base = OTHER; note = 2'-O-methyladenosine-3'-phosphate
  modified_base 11: mod_base = OTHER; note = 2'-O-methyladenosine-3'-phosphate
  modified_base 12: mod_base = OTHER; note = 2'-O-methyluridine-3'-phosphate
  modified_base 13: mod_base = OTHER; note = 2'-O-methylguanosine-3'-phosphate
  modified_base 14: mod_base = OTHER; note = 2'-deoxy-2'-fluorouridine-3'-phosphate
  modified_base 15: mod_base = OTHER; note = 2'-O-methylguanosine-3'-phosphate
  modified_base 16: mod_base = OTHER; note = 2'-deoxy-2'-fluorocytidine-3'-phosphate
  modified_base 17: mod_base = OTHER; note = 2'-O-methyladenosine-3'-phosphate
  modified_base 18: mod_base = OTHER; note = 2'-O-methylcytidine-3'-phosphate
  modified_base 19: mod_base = OTHER; note = 2'-O-methyladenosine-3'-phosphate
  modified_base 20: mod_base = OTHER; note = 2'-O-methyluridine-3'-phosphate
  modified_base 21: mod_base = OTHER; note = 2'-O-methylguanosine-3'-phosphorothioate
  modified_base 22: mod_base = OTHER; note = 2'-O-methylcytidine-3'-phosphorothioate
  modified_base 23: mod_base = OTHER; note = 2'-O-methylguanosine
acagttttcaatgtgcacatgcg

SEQ ID NO: 475 - RNA, 23 nt, synthetic construct
  source 1..23: mol_type = other RNA
  modified_base 5: mod_base = OTHER; note = 5'-methyluridine-3'-phosphate
  modified_base 7: mod_base = OTHER; note = 5'-methyluridine-3'-phosphate
  modified_base 13: mod_base = OTHER; note = 5'-methyluridine-3'-phosphate
  modified_base 14: mod_base = OTHER; note = 5'-methyluridine-3'-phosphate
  modified_base 21: mod_base = OTHER; note = 5'-methyluridine-3'-phosphate
  modified_base 23: mod_base = OTHER; note = 5'-methyluridine
cgcatgtgcacattgaaaactgt

SEQ ID NO: 476 - RNA, 21 nt, synthetic construct
  source 1..21: mol_type = other RNA
  modified_base 1: mod_base = OTHER; note = 2'-O-methyladenosine-3'-phosphorothioate
  modified_base 2: mod_base = OTHER; note = 2'-O-methyladenosine-3'-phosphorothioate
  modified_base 3: mod_base = OTHER; note = 2'-O-methylcytidine-3'-phosphate
  modified_base 4: mod_base = OTHER; note = 2'-O-methylcytidine-3'-phosphate
  modified_base 5: mod_base = OTHER; note = 2'-O-methyladenosine-3'-phosphate
  modified_base 6: mod_base = OTHER; note = 2'-O-methylguanosine-3'-phosphate
  modified_base 7: mod_base = OTHER; note = 2'-deoxy-2'-fluoroadenosine-3'-phosphate
  modified_base 8: mod_base = OTHER; note = 2'-O-methyluridine-3'-phosphate
  modified_base 9: mod_base = OTHER; note = 2'-deoxy-2'-fluoroguanosine-3'-phosphate
  modified_base 10: mod_base = OTHER; note = 2'-deoxy-2'-fluorouridine-3'-phosphate
  modified_base 11: mod_base = OTHER; note = 2'-deoxy-2'-fluorouridine-3'-phosphate
  modified_base 12: mod_base = OTHER; note = 2'-O-methyluridine-3'-phosphate
  modified_base 13: mod_base = OTHER; note = 2'-O-methyluridine-3'-phosphate
  modified_base 14: mod_base = OTHER; note = 2'-O-methylcytidine-3'-phosphate
  modified_base 15: mod_base = OTHER; note = 2'-O-methylcytidine-3'-phosphate
  modified_base 16: mod_base = OTHER; note = 2'-O-methyladenosine-3'-phosphate
  modified_base 17: mod_base = OTHER; note = 2'-O-methylcytidine-3'-phosphate
  modified_base 18: mod_base = OTHER; note = 2'-O-methylcytidine-3'-phosphate
  modified_base 19: mod_base = OTHER; note = 2'-O-methyladenosine-3'-phosphate
  modified_base 20: mod_base = OTHER; note = 2'-O-methyladenosine-3'-phosphate
  modified_base 21: mod_base = OTHER; note = 2'-O-methyladenosine-3'-phosphate ((2S,4R)-1-[29-[[2-(acetylamino)-2-deoxy-beta-D-galactopyra nosyl]oxy]-14,14-bis[[3-[[3-[[5-[[2-(acetylamino)-2-deoxy-b eta-D-galactopyranosyl]oxy]-1-oxopentyl]amino]propyl]amino] -3-oxopropoxy]methyl]-1,12,19,25-tetraoxo-16-oxa-13,20,24-t riazanonacos-1-yl]-4-hydroxy-2-pyrrolidinyl)methyl ester
aaccagatgttttccaccaaa

SEQ ID NO: 477 - RNA, 23 nt, synthetic construct
  source 1..23: mol_type = other RNA
  modified_base 1: mod_base = OTHER; note = 2'-O-methyluridine-3'-phosphorothioate
  modified_base 2: mod_base = OTHER; note = 2'-deoxy-2'-fluorouridine-3'-phosphorothioate
  modified_base 3: mod_base = OTHER; note = 2'-O-methyluridine-3'-phosphate
  modified_base 4: mod_base = OTHER; note = 2'-O-methylguanosine-3'-phosphate
  modified_base 5: mod_base = OTHER; note = 2'-O-methylguanosine-3'-phosphate
  modified_base 6: mod_base = OTHER; note = 2'-deoxy-2'-fluorouridine-3'-phosphate
  modified_base 7: mod_base = OTHER; note = 2'-O-methylguanosine-3'-phosphate
  modified_base 8: mod_base = OTHER; note = 2'-deoxy-2'-fluoroguanosine-3'-phosphate
  modified_base 9: mod_base = OTHER; note = 2'-deoxy-2'-fluoroadenosine-3'-phosphate
  modified_base 10: mod_base = OTHER; note = 2'-O-methyladenosine-3'-phosphate
  modified_base 11: mod_base = OTHER; note = 2'-O-methyladenosine-3'-phosphate
  modified_base 12: mod_base = OTHER; note = 2'-O-methyladenosine-3'-phosphate
  modified_base 13: mod_base = OTHER; note = 2'-O-methylcytidine-3'-phosphate
  modified_base 14: mod_base = OTHER; note = 2'-deoxy-2'-fluoroadenosine-3'-phosphate
  modified_base 15: mod_base = OTHER; note = 2'-O-methyluridine-3'-phosphate
  modified_base 16: mod_base = OTHER; note = 2'-deoxy-2'-fluorocytidine-3'-phosphate
  modified_base 17: mod_base = OTHER; note = 2'-O-methyluridine-3'-phosphate
  modified_base 18: mod_base = OTHER; note = 2'-O-methylguanosine-3'-phosphate
  modified_base 19: mod_base = OTHER; note = 2'-O-methylguanosine-3'-phosphate
  modified_base 20: mod_base = OTHER; note = 2'-O-methyluridine-3'-phosphate
  modified_base 21: mod_base = OTHER; note = 2'-O-methyluridine-3'-phosphorothioate
  modified_base 22: mod_base = OTHER; note = 2'-O-methyluridine-3'-phosphorothioate
  modified_base 23: mod_base = OTHER; note = 2'-O-methyluridine
tttggtggaaaacatctggtttt

SEQ ID NO: 478 - RNA, 23 nt, synthetic construct
  source 1..23: mol_type = other RNA
  modified_base 10: mod_base = OTHER; note = 5'-methyluridine-3'-phosphate
  modified_base 12: mod_base = OTHER; note = 5'-methyluridine-3'-phosphate
  modified_base 13: mod_base = OTHER; note = 5'-methyluridine-3'-phosphate
  modified_base 14: mod_base = OTHER; note = 5'-methyluridine-3'-phosphate
  modified_base 15: mod_base = OTHER; note = 5'-methyluridine-3'-phosphate
aaaaccagatgttttccaccaaa

SEQ ID NO: 479 - RNA, 21 nt, synthetic construct
  source 1..21: mol_type = other RNA
  modified_base 1: mod_base = OTHER; note = 2'-O-methyladenosine-3'-phosphorothioate
  modified_base 2: mod_base = OTHER; note = 2'-O-methyluridine-3'-phosphorothioate
  modified_base 3: mod_base = OTHER; note = 2'-deoxy-2'-fluoroguanosine-3'-phosphate
  modified_base 4: mod_base = OTHER; note = 2'-O-methylguanosine-3'-phosphate
  modified_base 5: mod_base = OTHER; note = 2'-deoxy-2'-fluorouridine-3'-phosphate
  modified_base 6: mod_base = OTHER; note = 2'-O-methylcytidine-3'-phosphate
  modified_base 7: mod_base = OTHER; note = 2'-deoxy-2'-fluoroadenosine-3'-phosphate
  modified_base 8: mod_base = OTHER; note = 2'-O-methylguanosine-3'-phosphate
  modified_base 9: mod_base = OTHER; note = 2'-deoxy-2'-fluoroadenosine-3'-phosphate
  modified_base 10: mod_base = OTHER; note = 2'-deoxy-2'-fluorouridine-3'-phosphate
  modified_base 11: mod_base = OTHER; note = 2'-deoxy-2'-fluorocytidine-3'-phosphate
  modified_base 12: mod_base = OTHER; note = 2'-O-methyluridine-3'-phosphate
  modified_base 13: mod_base = OTHER; note = 2'-deoxy-2'-fluorouridine-3'-phosphate
  modified_base 14: mod_base = OTHER; note = 2'-O-methylcytidine-3'-phosphate
  modified_base 15: mod_base = OTHER; note = 2'-deoxy-2'-fluoroadenosine-3'-phosphate
  modified_base 16: mod_base = OTHER; note = 2'-O-methyladenosine-3'-phosphate
  modified_base 17: mod_base = OTHER; note = 2'-deoxy-2'-fluoroadenosine-3'-phosphate
  modified_base 18: mod_base = OTHER; note = 2'-O-methyladenosine-3'-phosphate
  modified_base 19: mod_base = OTHER; note = 2'-deoxy-2'-fluorouridine-3'-phosphate
  modified_base 20: mod_base = OTHER; note = 2'-O-methyladenosine-3'-phosphate
  modified_base 21: mod_base = OTHER; note = 2'-O-methyladenosine-3'-phosphate ((2S,4R)-1-[29-[[2-(acetylamino)-2-deoxy-beta-D-galactopyra nosyl]oxy]-14,14-bis[[3-[[3-[[5-[[2-(acetylamino)-2-deoxy-b eta-D-galactopyranosyl]oxy]-1-oxopentyl]amino]propyl]amino] -3-oxopropoxy]methyl]-1,12,19,25-tetraoxo-16-oxa-13,20,24-t riazanonacos-1-yl]-4-hydroxy-2-pyrrolidinyl)methyl ester
atggtcagatcttcaaaataa

SEQ ID NO: 480 - RNA, 23 nt, synthetic construct
  source 1..23: mol_type = other RNA
  modified_base 1: mod_base = OTHER; note = 2'-O-methyluridine-3'-phosphorothioate
  modified_base 2: mod_base = OTHER; note = 2'-deoxy-2'-fluorouridine-3'-phosphorothioate
  modified_base 3: mod_base = OTHER; note = 2'-O-methyladenosine-3'-phosphate
  modified_base 4: mod_base = OTHER; note = 2'-O-methyluridine-3'-phosphate
  modified_base 5: mod_base = OTHER; note = 2'-O-methyluridine-3'-phosphate
  modified_base 6: mod_base = OTHER; note = 2'-deoxy-2'-fluorouridine-3'-phosphate
  modified_base 7: mod_base = OTHER; note = 2'-O-methyluridine-3'-phosphate
  modified_base 8: mod_base = OTHER; note = 2'-deoxy-2'-fluoroguanosine-3'-phosphate
  modified_base 9: mod_base = OTHER; note = 2'-deoxy-2'-fluoroadenosine-3'-phosphate
  modified_base 10: mod_base = OTHER; note = 2'-O-methyladenosine-3'-phosphate
  modified_base 11: mod_base = OTHER; note = 2'-O-methylguanosine-3'-phosphate
  modified_base 12: mod_base = OTHER; note = 2'-O-methyladenosine-3'-phosphate
  modified_base 13: mod_base = OTHER; note = 2'-O-methyluridine-3'-phosphate
  modified_base 14: mod_base = OTHER; note = 2'-deoxy-2'-fluorocytidine-3'-phosphate
  modified_base 15: mod_base = OTHER; note = 2'-O-methyluridine-3'-phosphate
  modified_base 16: mod_base = OTHER; note = 2'-deoxy-2'-fluoroguanosine-3'-phosphate
  modified_base 17: mod_base = OTHER; note = 2'-O-methyladenosine-3'-phosphate
  modified_base 18: mod_base = OTHER; note = 2'-O-methylcytidine-3'-phosphate
  modified_base 19: mod_base = OTHER; note = 2'-O-methylcytidine-3'-phosphate
  modified_base 20: mod_base = OTHER; note = 2'-O-methyladenosine-3'-phosphate
  modified_base 21: mod_base = OTHER; note = 2'-O-methyluridine-3'-phosphorothioate
  modified_base 22: mod_base = OTHER; note = 2'-O-methyluridine-3'-phosphorothioate
  modified_base 23: mod_base = OTHER; note = 2'-O-methylguanosine
ttattttgaagatctgaccattg

SEQ ID NO: 481 - RNA, 23 nt, synthetic construct
  source 1..23: mol_type = other RNA
  modified_base 4: mod_base = OTHER; note = 5'-methyluridine-3'-phosphate
  modified_base 7: mod_base = OTHER; note = 5'-methyluridine-3'-phosphate
  modified_base 12: mod_base = OTHER; note = 5'-methyluridine-3'-phosphate
  modified_base 14: mod_base = OTHER; note = 5'-methyluridine-3'-phosphate
  modified_base 15: mod_base = OTHER; note = 5'-methyluridine-3'-phosphate
  modified_base 21: mod_base = OTHER; note = 5'-methyluridine-3'-phosphate
caatggtcagatcttcaaaataa

SEQ ID NO: 482 - RNA, 21 nt, synthetic construct
  source 1..21: mol_type = other RNA
  modified_base 1: mod_base = OTHER; note = 2'-O-methyladenosine-3'-phosphorothioate
  modified_base 2: mod_base = OTHER; note = 2'-O-methyladenosine-3'-phosphorothioate
  modified_base 3: mod_base = OTHER; note = 2'-O-methyluridine-3'-phosphate
  modified_base 4: mod_base = OTHER; note = 2'-O-methylguanosine-3'-phosphate
  modified_base 5: mod_base = OTHER; note = 2'-O-methylguanosine-3'-phosphate
  modified_base 6: mod_base = OTHER; note = 2'-O-methyluridine-3'-phosphate
  modified_base 7: mod_base = OTHER; note = 2'-deoxy-2'-fluorocytidine-3'-phosphate
  modified_base 8: mod_base = OTHER; note = 2'-O-methyladenosine-3'-phosphate
  modified_base 9: mod_base = OTHER; note = 2'-deoxy-2'-fluoroguanosine-3'-phosphate
  modified_base 10: mod_base = OTHER; note = 2'-deoxy-2'-fluoroadenosine-3'-phosphate
  modified_base 11: mod_base = OTHER; note = 2'-deoxy-2'-fluorouridine-3'-phosphate
  modified_base 12: mod_base = OTHER; note = 2'-O-methylcytidine-3'-phosphate
  modified_base 13: mod_base = OTHER; note = 2'-O-methyluridine-3'-phosphate
  modified_base 14: mod_base = OTHER; note = 2'-O-methyluridine-3'-phosphate
  modified_base 15: mod_base = OTHER; note = 2'-O-methylcytidine-3'-phosphate
  modified_base 16: mod_base = OTHER; note = 2'-O-methyladenosine-3'-phosphate
  modified_base 17: mod_base = OTHER; note = 2'-O-methyladenosine-3'-phosphate
  modified_base 18: mod_base = OTHER; note = 2'-O-methyladenosine-3'-phosphate
  modified_base 19: mod_base = OTHER; note = 2'-O-methyladenosine-3'-phosphate
  modified_base 20: mod_base = OTHER; note = 2'-O-methyluridine-3'-phosphate
  modified_base 21: mod_base = OTHER; note = 2'-O-methyladenosine-3'-phosphate ((2S,4R)-1-[29-[[2-(acetylamino)-2-deoxy-beta-D-galactopyra nosyl]oxy]-14,14-bis[[3-[[3-[[5-[[2-(acetylamino)-2-deoxy-b eta-D-galactopyranosyl]oxy]-1-oxopentyl]amino]propyl]amino] -3-oxopropoxy]methyl]-1,12,19,25-tetraoxo-16-oxa-13,20,24-t riazanonacos-1-yl]-4-hydroxy-2-pyrrolidinyl)methyl ester
aatggtcagatcttcaaaata

SEQ ID NO: 483 - RNA, 23 nt, synthetic construct
  source 1..23: mol_type = other RNA
  modified_base 1: mod_base = OTHER; note = 2'-O-methyluridine-3'-phosphorothioate
  modified_base 2: mod_base = OTHER; note = 2'-deoxy-2'-fluoroadenosine-3'-phosphorothioate
  modified_base 3: mod_base = OTHER; note = 2'-O-methyluridine-3'-phosphate
  modified_base 4: mod_base = OTHER; note = 2'-O-methyluridine-3'-phosphate
  modified_base 5: mod_base = OTHER; note = 2'-O-methyluridine-3'-phosphate
  modified_base 6: mod_base = OTHER; note = 2'-deoxy-2'-fluorouridine-3'-phosphate
  modified_base 7: mod_base = OTHER; note = 2'-O-methylguanosine-3'-phosphate
  modified_base 8: mod_base = OTHER; note = 2'-deoxy-2'-fluoroadenosine-3'-phosphate
  modified_base 9: mod_base = OTHER; note = 2'-deoxy-2'-fluoroadenosine-3'-phosphate
  modified_base 10: mod_base = OTHER; note = 2'-O-methylguanosine-3'-phosphate
  modified_base 11: mod_base = OTHER; note = 2'-O-methyladenosine-3'-phosphate
  modified_base 12: mod_base = OTHER; note = 2'-O-methyluridine-3'-phosphate
  modified_base 13: mod_base = OTHER; note = 2'-O-methylcytidine-3'-phosphate
  modified_base 14: mod_base = OTHER; note = 2'-deoxy-2'-fluorouridine-3'-phosphate
  modified_base 15: mod_base = OTHER; note = 2'-O-methylguanosine-3'-phosphate
  modified_base 16: mod_base = OTHER; note = 2'-deoxy-2'-fluoroadenosine-3'-phosphate
  modified_base 17: mod_base = OTHER; note = 2'-O-methylcytidine-3'-phosphate
  modified_base 18: mod_base = OTHER; note = 2'-O-methylcytidine-3'-phosphate
  modified_base 19: mod_base = OTHER; note = 2'-O-methyladenosine-3'-phosphate
  modified_base 20: mod_base = OTHER; note = 2'-O-methyluridine-3'-phosphate
  modified_base 21: mod_base = OTHER; note = 2'-O-methyluridine-3'-phosphorothioate
  modified_base 22: mod_base = OTHER; note = 2'-O-methylguanosine-3'-phosphorothioate
  modified_base 23: mod_base = OTHER; note = 2'-O-methylguanosine
tattttgaagatctgaccattgg

SEQ ID NO: 484 - RNA, 23 nt, synthetic construct
  source 1..23: mol_type = other RNA
  modified_base 5: mod_base = OTHER; note = 5'-methyluridine-3'-phosphate
  modified_base 8: mod_base = OTHER; note = 5'-methyluridine-3'-phosphate
  modified_base 13: mod_base = OTHER; note = 5'-methyluridine-3'-phosphate
  modified_base 15: mod_base = OTHER; note = 5'-methyluridine-3'-phosphate
  modified_base 16: mod_base = OTHER; note = 5'-methyluridine-3'-phosphate
  modified_base 22: mod_base = OTHER; note = 5'-methyluridine-3'-phosphate
ccaatggtcagatcttcaaaata

SEQ ID NO: 485 - RNA, 21 nt, synthetic construct
  source 1..21: mol_type = other RNA
  modified_base 1: mod_base = OTHER; note = 2'-O-methyladenosine-3'-phosphorothioate
  modified_base 2: mod_base = OTHER; note = 2'-O-methyluridine-3'-phosphorothioate
  modified_base 3: mod_base = OTHER; note = 2'-deoxy-2'-fluoroguanosine-3'-phosphate
  modified_base 4: mod_base = OTHER; note = 2'-O-methylguanosine-3'-phosphate
  modified_base 5: mod_base = OTHER; note = 2'-deoxy-2'-fluorouridine-3'-phosphate
  modified_base 6: mod_base = OTHER; note = 2'-O-methylcytidine-3'-phosphate
  modified_base 7: mod_base = OTHER; note = 2'-deoxy-2'-fluoroadenosine-3'-phosphate
  modified_base 8: mod_base = OTHER; note = 2'-O-methylguanosine-3'-phosphate
  modified_base 9: mod_base = OTHER; note = 2'-deoxy-2'-fluoroadenosine-3'-phosphate
  modified_base 10: mod_base = OTHER; note = 2'-deoxy-2'-fluorouridine-3'-phosphate
  modified_base 11: mod_base = OTHER; note = 2'-deoxy-2'-fluorocytidine-3'-phosphate
  modified_base 12: mod_base = OTHER; note = 2'-O-methyluridine-3'-phosphate
  modified_base 13: mod_base = OTHER; note = 2'-deoxy-2'-fluorouridine-3'-phosphate
  modified_base 14: mod_base = OTHER; note = 2'-O-methylcytidine-3'-phosphate
  modified_base 15: mod_base = OTHER; note = 2'-deoxy-2'-fluoroadenosine-3'-phosphate
  modified_base 16: mod_base = OTHER; note = 2'-O-methyladenosine-3'-phosphate
  modified_base 17: mod_base = OTHER; note = 2'-deoxy-2'-fluoroadenosine-3'-phosphate
  modified_base 18: mod_base = OTHER; note = 2'-O-methyladenosine-3'-phosphate
  modified_base 19: mod_base = OTHER; note = 2'-deoxy-2'-fluorouridine-3'-phosphate
  modified_base 20: mod_base = OTHER; note = 2'-O-methyladenosine-3'-phosphate
  modified_base 21: mod_base = OTHER; note = 2'-O-methyladenosine-3'-phosphate ((2S,4R)-1-[29-[[2-(acetylamino)-2-deoxy-beta-D-galactopyra nosyl]oxy]-14,14-bis[[3-[[3-[[5-[[2-(acetylamino)-2-deoxy-b eta-D-galactopyranosyl]oxy]-1-oxopentyl]amino]propyl]amino] -3-oxopropoxy]methyl]-1,12,19,25-tetraoxo-16-oxa-13,20,24-t riazanonacos-1-yl]-4-hydroxy-2-pyrrolidinyl)methyl ester
atggtcagatcttcaaaataa

SEQ ID NO: 486 - RNA, 23 nt, synthetic construct
  source 1..23: mol_type = other RNA
  modified_base 1: mod_base = OTHER; note = 2'-O-methyluridine-3'-phosphorothioate
  modified_base 2: mod_base = OTHER; note = 2'-deoxy-2'-fluorouridine-3'-phosphorothioate
  modified_base 3: mod_base = OTHER; note = 2'-O-methyladenosine-3'-phosphate
  modified_base 4: mod_base = OTHER; note = 2'-O-methyluridine-3'-phosphate
  modified_base 5: mod_base = OTHER; note = 2'-O-methyluridine-3'-phosphate
  modified_base 6: mod_base = OTHER; note = 2'-deoxy-2'-fluorouridine-3'-phosphate
  modified_base 7: mod_base = OTHER; note = 2'-O-methyluridine-3'-phosphate
  modified_base 8: mod_base = OTHER; note = 2'-deoxy-2'-fluoroguanosine-3'-phosphate
  modified_base 9: mod_base = OTHER; note = 2'-deoxy-2'-fluoroadenosine-3'-phosphate
  modified_base 10: mod_base = OTHER; note = 2'-O-methyladenosine-3'-phosphate
  modified_base 11: mod_base = OTHER; note = 2'-O-methylguanosine-3'-phosphate
  modified_base 12: mod_base = OTHER; note = 2'-O-methyladenosine-3'-phosphate
  modified_base 13: mod_base = OTHER; note = 2'-O-methyluridine-3'-phosphate
  modified_base 14: mod_base = OTHER; note = 2'-deoxy-2'-fluorocytidine-3'-phosphate
  modified_base 15: mod_base = OTHER; note = 2'-O-methyluridine-3'-phosphate
  modified_base 16: mod_base = OTHER; note = 2'-deoxy-2'-fluoroguanosine-3'-phosphate
  modified_base 17: mod_base = OTHER; note = 2'-O-methyladenosine-3'-phosphate
  modified_base 18: mod_base = OTHER; note = 2'-O-methylcytidine-3'-phosphate
  modified_base 19: mod_base = OTHER; note = 2'-O-methylcytidine-3'-phosphate
  modified_base 20: mod_base = OTHER; note = 2'-O-methyladenosine-3'-phosphate
  modified_base 21: mod_base = OTHER; note = 2'-O-methyluridine-3'-phosphorothioate
  modified_base 22: mod_base = OTHER; note = 2'-O-methyluridine-3'-phosphorothioate
  modified_base 23: mod_base = OTHER; note = 2'-O-methylguanosine
ttattttgaagatctgaccattg

SEQ ID NO: 487 - RNA, 23 nt, synthetic construct
  source 1..23: mol_type = other RNA
  modified_base 4: mod_base = OTHER; note = 5'-methyluridine-3'-phosphate
  modified_base 7: mod_base = OTHER; note = 5'-methyluridine-3'-phosphate
  modified_base 12: mod_base = OTHER; note = 5'-methyluridine-3'-phosphate
  modified_base 14: mod_base = OTHER; note = 5'-methyluridine-3'-phosphate
  modified_base 15: mod_base = OTHER; note = 5'-methyluridine-3'-phosphate
  modified_base 21: mod_base = OTHER; note = 5'-methyluridine-3'-phosphate
caatggtcagatcttcaaaataa

SEQ ID NO: 488 - RNA, 21 nt, synthetic construct
  source 1..21: mol_type = other RNA
  modified_base 1: mod_base = OTHER; note = 2'-O-methyluridine-3'-phosphorothioate
  modified_base 2: mod_base = OTHER; note = 2'-O-methyluridine-3'-phosphorothioate
  modified_base 3: mod_base = OTHER; note = 2'-O-methylguanosine-3'-phosphate
  modified_base 4: mod_base = OTHER; note = 2'-O-methyluridine-3'-phosphate
  modified_base 5: mod_base = OTHER; note = 2'-O-methylguanosine-3'-phosphate
  modified_base 6: mod_base = OTHER; note = 2'-O-methyluridine-3'-phosphate
  modified_base 7: mod_base = OTHER; note = 2'-deoxy-2'-fluorocytidine-3'-phosphate
  modified_base 8: mod_base = OTHER; note = 2'-O-methyladenosine-3'-phosphate
  modified_base 9: mod_base = OTHER; note = 2'-deoxy-2'-fluoroadenosine-3'-phosphate
  modified_base 10: mod_base = OTHER; note = 2'-O-methyladenosine-3'-phosphate
  modified_base 11: mod_base = OTHER; note = 2'-deoxy-2'-fluoroadenosine-3'-phosphate
  modified_base 12: mod_base = OTHER; note = 2'-O-methyluridine-3'-phosphate
  modified_base 13: mod_base = OTHER; note = 2'-O-methylguanosine-3'-phosphate
  modified_base 14: mod_base = OTHER; note = 2'-O-methyluridine-3'-phosphate
  modified_base 15: mod_base = OTHER; note = 2'-O-methyluridine-3'-phosphate
  modified_base 16: mod_base = OTHER; note = 2'-O-methylcytidine-3'-phosphate
  modified_base 17: mod_base = OTHER; note = 2'-O-methyluridine-3'-phosphate
  modified_base 18: mod_base = OTHER; note = 2'-O-methyladenosine-3'-phosphate
  modified_base 19: mod_base = OTHER; note = 2'-O-methylcytidine-3'-phosphate
  modified_base 20: mod_base = OTHER; note = 2'-O-methyladenosine-3'-phosphate
  modified_base 21: mod_base = OTHER; note = 2'-O-methyluridine-3'-phosphate ((2S,4R)-1-[29-[[2-(acetylamino)-2-deoxy-beta-D-galactopyra nosyl]oxy]-14,14-bis[[3-[[3-[[5-[[2-(acetylamino)-2-deoxy-b eta-D-galactopyranosyl]oxy]-1-oxopentyl]amino]propyl]amino] -3-oxopropoxy]methyl]-1,12,19,25-tetraoxo-16-oxa-13,20,24-t riazanonacos-1-yl]-4-hydroxy-2-pyrrolidinyl)methyl ester
ttgtgtcaaaatgttctacat

SEQ ID NO: 489 - RNA, 23 nt, synthetic construct
  source 1..23: mol_type = other RNA
  modified_base 1: mod_base = OTHER; note = 2'-O-methyladenosine-3'-phosphorothioate
  modified_base 2: mod_base = OTHER; note = 2'-deoxy-2'-fluorouridine-3'-phosphorothioate
  modified_base 3: mod_base = OTHER; note = 2'-O-methylguanosine-3'-phosphate
  modified_base 4: mod_base = OTHER; note = 2'-O-methyluridine-3'-phosphate
  modified_base 5: mod_base = OTHER; note = 2'-O-methyladenosine-3'-phosphate
  modified_base 6: mod_base = OTHER; note = 2'-deoxy-2'-fluoroguanosine-3'-phosphate
  modified_base 7: mod_base = OTHER; note = 2'-O-methyladenosine-3'-phosphate
  modified_base 8: mod_base = OTHER; note = 2'-deoxy-2'-fluoroadenosine-3'-phosphate
  modified_base 9: mod_base = OTHER; note = 2'-deoxy-2'-fluorocytidine-3'-phosphate
  modified_base 10: mod_base = OTHER; note = 2'-O-methyladenosine-3'-phosphate
  modified_base 11: mod_base = OTHER; note = 2'-O-methyluridine-3'-phosphate
  modified_base 12: mod_base = OTHER; note = 2'-deoxy-2'-fluorouridine-3'-phosphate
  modified_base 13: mod_base = OTHER; note = 2'-O-methyluridine-3'-phosphate
  modified_base 14: mod_base = OTHER; note = 2'-deoxy-2'-fluorouridine-3'-phosphate
  modified_base 15: mod_base = OTHER; note = 2'-O-methylguanosine-3'-phosphate
  modified_base 16: mod_base = OTHER; note = 2'-deoxy-2'-fluoroadenosine-3'-phosphate
  modified_base 17: mod_base = OTHER; note = 2'-O-methylcytidine-3'-phosphate
  modified_base 18: mod_base = OTHER; note = 2'-O-methyladenosine-3'-phosphate
  modified_base 19: mod_base = OTHER; note = 2'-O-methylcytidine-3'-phosphate
  modified_base 20: mod_base = OTHER; note = 2'-O-methyladenosine-3'-phosphate
  modified_base 21: mod_base = OTHER; note = 2'-O-methyladenosine-3'-phosphorothioate
  modified_base 22: mod_base = OTHER; note = 2'-O-methyladenosine-3'-phosphorothioate
  modified_base 23: mod_base = OTHER; note = 2'-O-methyladenosine
atgtagaacattttgacacaaaa

SEQ ID NO: 490 - RNA, 23 nt, synthetic construct
  source 1..23: mol_type = other RNA
  modified_base 1: mod_base = OTHER; note = 5'-methyluridine-3'-phosphate
  modified_base 2: mod_base = OTHER; note = 5'-methyluridine-3'-phosphate
  modified_base 3: mod_base = OTHER; note = 5'-methyluridine-3'-phosphate
  modified_base 4: mod_base = OTHER; note = 5'-methyluridine-3'-phosphate
  modified_base 6: mod_base = OTHER; note = 5'-methyluridine-3'-phosphate
  modified_base 8: mod_base = OTHER; note = 5'-methyluridine-3'-phosphate
  modified_base 14: mod_base = OTHER; note = 5'-methyluridine-3'-phosphate
  modified_base 16: mod_base = OTHER; note = 5'-methyluridine-3'-phosphate
  modified_base 17: mod_base = OTHER; note = 5'-methyluridine-3'-phosphate
  modified_base 19: mod_base = OTHER; note = 5'-methyluridine-3'-phosphate
  modified_base 23: mod_base = OTHER; note = 5'-methyluridine
ttttgtgtcaaaatgttctacat

SEQ ID NO: 491 - RNA, 21 nt, synthetic construct
  source 1..21: mol_type = other RNA
  modified_base 1: mod_base = OTHER; note = 2'-O-methyluridine-3'-phosphorothioate
  modified_base 2: mod_base = OTHER; note = 2'-O-methyluridine-3'-phosphorothioate
  modified_base 3: mod_base = OTHER; note = 2'-O-methylguanosine-3'-phosphate
  modified_base 4: mod_base = OTHER; note = 2'-O-methyluridine-3'-phosphate
  modified_base 5: mod_base = OTHER; note = 2'-O-methylguanosine-3'-phosphate
  modified_base 6: mod_base = OTHER; note = 2'-O-methyluridine-3'-phosphate
  modified_base 7: mod_base = OTHER; note = 2'-deoxy-2'-fluorocytidine-3'-phosphate
  modified_base 8: mod_base = OTHER; note = 2'-O-methyladenosine-3'-phosphate
  modified_base 9: mod_base = OTHER; note = 2'-deoxy-2'-fluoroadenosine-3'-phosphate
  modified_base 10: mod_base = OTHER; note = 2'-O-methyladenosine-3'-phosphate
  modified_base 11: mod_base = OTHER; note = 2'-deoxy-2'-fluoroadenosine-3'-phosphate
  modified_base 12: mod_base = OTHER; note = 2'-O-methyluridine-3'-phosphate
  modified_base 13: mod_base = OTHER; note = 2'-O-methylguanosine-3'-phosphate
  modified_base 14: mod_base = OTHER; note = 2'-O-methyluridine-3'-phosphate
  modified_base 15: mod_base = OTHER; note = 2'-O-methyluridine-3'-phosphate
  modified_base 16: mod_base = OTHER; note = 2'-O-methylcytidine-3'-phosphate
  modified_base 17: mod_base = OTHER; note = 2'-O-methyluridine-3'-phosphate
  modified_base 18: mod_base = OTHER; note = 2'-O-methyladenosine-3'-phosphate
  modified_base 19: mod_base = OTHER; note = 2'-O-methylcytidine-3'-phosphate
  modified_base 20: mod_base = OTHER; note = 2'-O-methyladenosine-3'-phosphate
  modified_base 21: mod_base = OTHER; note = 2'-O-methyluridine-3'-phosphate ((2S,4R)-1-[29-[[2-(acetylamino)-2-deoxy-beta-D-galactopyra nosyl]oxy]-14,14-bis[[3-[[3-[[5-[[2-(acetylamino)-2-deoxy-b eta-D-galactopyranosyl]oxy]-1-oxopentyl]amino]propyl]amino] -3-oxopropoxy]methyl]-1,12,19,25-tetraoxo-16-oxa-13,20,24-t riazanonacos-1-yl]-4-hydroxy-2-pyrrolidinyl)methyl ester
ttgtgtcaaaatgttctacat

SEQ ID NO: 492 - RNA, 23 nt, synthetic construct
  source 1..23: mol_type = other RNA
  modified_base 1: mod_base = OTHER; note = 2'-O-methyladenosine-3'-phosphorothioate
  modified_base 2: mod_base = OTHER; note = 2'-deoxy-2'-fluorouridine-3'-phosphorothioate
  modified_base 3: mod_base = OTHER; note = 2'-O-methylguanosine-3'-phosphate
  modified_base 4: mod_base = OTHER; note = 2'-O-methyluridine-3'-phosphate
  modified_base 5: mod_base = OTHER; note = 2'-O-methyladenosine-3'-phosphate
  modified_base 6: mod_base = OTHER; note = 2'-deoxy-2'-fluoroguanosine-3'-phosphate
  modified_base 7: mod_base = OTHER; note = 2'-O-methyladenosine-3'-phosphate
  modified_base 8: mod_base = OTHER; note = 2'-deoxy-2'-fluoroadenosine-3'-phosphate
  modified_base 9: mod_base = OTHER; note = 2'-deoxy-2'-fluorocytidine-3'-phosphate
  modified_base 10: mod_base = OTHER; note = 2'-O-methyladenosine-3'-phosphate
  modified_base 11: mod_base = OTHER; note = 2'-O-methyluridine-3'-phosphate
  modified_base 12: mod_base = OTHER; note = 2'-deoxy-2'-fluorouridine-3'-phosphate
  modified_base 13: mod_base = OTHER; note = 2'-O-methyluridine-3'-phosphate
  modified_base 14: mod_base = OTHER; note = 2'-deoxy-2'-fluorouridine-3'-phosphate
  modified_base 15: mod_base = OTHER; note = 2'-O-methylguanosine-3'-phosphate
  modified_base 16: mod_base = OTHER; note = 2'-deoxy-2'-fluoroadenosine-3'-phosphate
  modified_base 17: mod_base = OTHER; note = 2'-O-methylcytidine-3'-phosphate
  modified_base 18: mod_base = OTHER; note = 2'-O-methyladenosine-3'-phosphate
  modified_base 19: mod_base = OTHER; note = 2'-O-methylcytidine-3'-phosphate
  modified_base 20: mod_base = OTHER; note = 2'-O-methyladenosine-3'-phosphate
  modified_base 21: mod_base = OTHER; note = 2'-O-methyladenosine-3'-phosphorothioate
  modified_base 22: mod_base = OTHER; note = 2'-O-methyladenosine-3'-phosphorothioate
  modified_base 23: mod_base = OTHER; note = 2'-O-methyladenosine
atgtagaacattttgacacaaaa

SEQ ID NO: 493 - RNA, 23 nt, synthetic construct
  source 1..23: mol_type = other RNA
  modified_base 1: mod_base = OTHER; note = 5'-methyluridine-3'-phosphate
  modified_base 2: mod_base = OTHER; note = 5'-methyluridine-3'-phosphate
  modified_base 3: mod_base = OTHER; note = 5'-methyluridine-3'-phosphate
  modified_base 4: mod_base = OTHER; note = 5'-methyluridine-3'-phosphate
  modified_base 6: mod_base = OTHER; note = 5'-methyluridine-3'-phosphate
  modified_base 8: mod_base = OTHER; note = 5'-methyluridine-3'-phosphate
  modified_base 14: mod_base = OTHER; note = 5'-methyluridine-3'-phosphate
  modified_base 16: mod_base = OTHER; note = 5'-methyluridine-3'-phosphate
  modified_base 17: mod_base = OTHER; note = 5'-methyluridine-3'-phosphate
  modified_base 19: mod_base = OTHER; note = 5'-methyluridine-3'-phosphate
  modified_base 23: mod_base = OTHER; note = 5'-methyluridine
ttttgtgtcaaaatgttctacat

SEQ ID NO: 494 - RNA, 21 nt, synthetic construct
  source 1..21: mol_type = other RNA
  modified_base 1: mod_base = OTHER; note = 2'-O-methylguanosine-3'-phosphorothioate
  modified_base 2: mod_base = OTHER; note = 2'-O-methylcytidine-3'-phosphorothioate
  modified_base 3: mod_base = OTHER; note = 2'-O-methyluridine-3'-phosphate
  modified_base 4: mod_base = OTHER; note = 2'-O-methyladenosine-3'-phosphate
  modified_base 5: mod_base = OTHER; note = 2'-O-methylguanosine-3'-phosphate
  modified_base 6: mod_base = OTHER; note = 2'-O-methylguanosine-3'-phosphate
  modified_base 7: mod_base = OTHER; note = 2'-deoxy-2'-fluoroadenosine-3'-phosphate
  modified_base 8: mod_base = OTHER; note = 2'-O-methyladenosine-3'-phosphate
  modified_base 9: mod_base = OTHER; note = 2'-deoxy-2'-fluoroguanosine-3'-phosphate
  modified_base 10: mod_base = OTHER; note = 2'-deoxy-2'-fluorouridine-3'-phosphate
  modified_base 11: mod_base = OTHER; note = 2'-deoxy-2'-fluoroadenosine-3'-phosphate
  modified_base 12: mod_base = OTHER; note = 2'-O-methyluridine-3'-phosphate
  modified_base 13: mod_base = OTHER; note = 2'-O-methyluridine-3'-phosphate
  modified_base 14: mod_base = OTHER; note = 2'-O-methylcytidine-3'-phosphate
  modified_base 15: mod_base = OTHER; note = 2'-O-methyladenosine-3'-phosphate
  modified_base 16: mod_base = OTHER; note = 2'-O-methyluridine-3'-phosphate
  modified_base 17: mod_base = OTHER; note = 2'-O-methyluridine-3'-phosphate
  modified_base 18: mod_base = OTHER; note = 2'-O-methylcytidine-3'-phosphate
  modified_base 19: mod_base = OTHER; note = 2'-O-methyladenosine-3'-phosphate
  modified_base 20: mod_base = OTHER; note = 2'-O-methyladenosine-3'-phosphate
  modified_base 21: mod_base = OTHER; note = 2'-O-methyladenosine-3'-phosphate ((2S,4R)-1-[29-[[2-(acetylamino)-2-deoxy-beta-D-galactopyra nosyl]oxy]-14,14-bis[[3-[[3-[[5-[[2-(acetylamino)-2-deoxy-b eta-D-galactopyranosyl]oxy]-1-oxopentyl]amino]propyl]amino] -3-oxopropoxy]methyl]-1,12,19,25-tetraoxo-16-oxa-13,20,24-t riazanonacos-1-yl]-4-hydroxy-2-pyrrolidinyl)methyl ester
gctaggaagtattcattcaaa

SEQ ID NO: 495 - RNA, 23 nt, synthetic construct
  source 1..23: mol_type = other RNA
  modified_base 1: mod_base = OTHER; note = 2'-O-methyluridine-3'-phosphorothioate
  modified_base 2: mod_base = OTHER; note = 2'-deoxy-2'-fluorouridine-3'-phosphorothioate
  modified_base 3: mod_base = OTHER; note = 2'-O-methyluridine-3'-phosphate
  modified_base 4: mod_base = OTHER; note = 2'-O-methylguanosine-3'-phosphate
  modified_base 5: mod_base = OTHER; note = 2'-O-methyladenosine-3'-phosphate
  modified_base 6: mod_base = OTHER; note = 2'-deoxy-2'-fluoroadenosine-3'-phosphate
  modified_base 7: mod_base = OTHER; note = 2'-O-methyluridine-3'-phosphate
  modified_base 8: mod_base = OTHER; note = 2'-deoxy-2'-fluoroguanosine-3'-phosphate
  modified_base 9: mod_base = OTHER; note = 2'-deoxy-2'-fluoroadenosine-3'-phosphate
  modified_base 10: mod_base = OTHER; note = 2'-O-methyladenosine-3'-phosphate
  modified_base 11: mod_base = OTHER; note = 2'-O-methyluridine-3'-phosphate
  modified_base 12: mod_base = OTHER; note = 2'-O-methyladenosine-3'-phosphate
  modified_base 13: mod_base = OTHER; note = 2'-O-methylcytidine-3'-phosphate
  modified_base 14: mod_base = OTHER; note = 2'-deoxy-2'-fluorouridine-3'-phosphate
  modified_base 15: mod_base = OTHER; note = 2'-O-methyluridine-3'-phosphate
  modified_base 16: mod_base = OTHER; note = 2'-deoxy-2'-fluorocytidine-3'-phosphate
  modified_base 17: mod_base = OTHER; note = 2'-O-methylcytidine-3'-phosphate
  modified_base 18: mod_base = OTHER; note = 2'-O-methyluridine-3'-phosphate
  modified_base 19: mod_base = OTHER; note = 2'-O-methyladenosine-3'-phosphate
  modified_base 20: mod_base = OTHER; note = 2'-O-methylguanosine-3'-phosphate
  modified_base 21: mod_base = OTHER; note = 2'-O-methylcytidine-3'-phosphorothioate
  modified_base 22: mod_base = OTHER; note = 2'-O-methyluridine-3'-phosphorothioate
  modified_base 23: mod_base = OTHER; note = 2'-O-methyladenosine
tttgaatgaatacttcctagcta

SEQ ID NO: 496 - RNA, 23 nt, synthetic construct
  source 1..23: mol_type = other RNA
  modified_base 1: mod_base = OTHER; note = 5'-methyluridine-3'-phosphate
  modified_base 5: mod_base = OTHER; note = 5'-methyluridine-3'-phosphate
  modified_base 12: mod_base = OTHER; note = 5'-methyluridine-3'-phosphate
  modified_base 14: mod_base = OTHER; note = 5'-methyluridine-3'-phosphate
  modified_base 15: mod_base = OTHER; note = 5'-methyluridine-3'-phosphate
  modified_base 18: mod_base = OTHER; note = 5'-methyluridine-3'-phosphate
  modified_base 19: mod_base = OTHER; note = 5'-methyluridine-3'-phosphate
tagctaggaagtattcattcaaa

SEQ ID NO: 497 - RNA, 21 nt, synthetic construct
  source 1..21: mol_type = other RNA
  modified_base 1: mod_base = OTHER; note = 2'-O-methyluridine-3'-phosphorothioate
  modified_base 2: mod_base = OTHER; note = 2'-O-methyluridine-3'-phosphorothioate
  modified_base 3: mod_base = OTHER; note = 2'-O-methylguanosine-3'-phosphate
  modified_base 4: mod_base = OTHER; note = 2'-O-methyluridine-3'-phosphate
  modified_base 5: mod_base = OTHER; note = 2'-deoxy-2'-fluoroguanosine-3'-phosphate
  modified_base 6: mod_base = OTHER; note = 2'-O-methyluridine-3'-phosphate
  modified_base 7: mod_base = OTHER; note = 2'-deoxy-2'-fluorocytidine-3'-phosphate
  modified_base 8: mod_base = OTHER; note = 2'-O-methyladenosine-3'-phosphate
  modified_base 9: mod_base = OTHER; note = 2'-deoxy-2'-fluoroadenosine-3'-phosphate
  modified_base 10: mod_base = OTHER; note = 2'-O-methyladenosine-3'-phosphate
  modified_base 11: mod_base = OTHER; note = 2'-deoxy-2'-fluoroadenosine-3'-phosphate
  modified_base 12: mod_base = OTHER; note = 2'-deoxy-2'-fluorouridine-3'-phosphate
  modified_base 13: mod_base = OTHER; note = 2'-O-methylguanosine-3'-phosphate
  modified_base 14: mod_base = OTHER; note = 2'-O-hexadecyl-uridine-3'-phosphate
  modified_base 15: mod_base = OTHER; note = 2'-O-methyluridine-3'-phosphate
  modified_base 16: mod_base = OTHER; note = 2'-O-methylcytidine-3'-phosphate
  modified_base 17: mod_base = OTHER; note = 2'-O-methyluridine-3'-phosphate
  modified_base 18: mod_base = OTHER; note = 2'-O-methyladenosine-3'-phosphate
  modified_base 19: mod_base = OTHER; note = 2'-deoxy-2'-fluorocytidine-3'-phosphate
  modified_base 20: mod_base = OTHER; note = 2'-O-methyladenosine-3'-phosphate
  modified_base 21: mod_base = OTHER; note = 2'-deoxy-2'-fluorouridine-3'-phosphate ((2S,4R)-1-[29-[[2-(acetylamino)-2-deoxy-beta-D-galactopyra nosyl]oxy]-14,14-bis[[3-[[3-[[5-[[2-(acetylamino)-2-deoxy-b eta-D-galactopyranosyl]oxy]-1-oxopentyl]amino]propyl]amino] -3-oxopropoxy]methyl]-1,12,19,25-tetraoxo-16-oxa-13,20,24-t riazanonacos-1-yl]-4-hydroxy-2-pyrrolidinyl)methyl ester
ttgtgtcaaaatgttctacat

SEQ ID NO: 498 - RNA, 23 nt, synthetic construct
  source 1..23: mol_type = other RNA
  modified_base 1: mod_base = OTHER; note = 2'-O-methyladenosine-3'-phosphorothioate
  modified_base 2: mod_base = OTHER; note = 2'-deoxy-2'-fluorouridine-3'-phosphorothioate
  modified_base 3: mod_base = OTHER; note = 2'-O-methylguanosine-3'-phosphate
  modified_base 4: mod_base = OTHER; note = 2'-O-methyluridine-3'-phosphate
  modified_base 5: mod_base = OTHER; note = 2'-deoxy-2'-fluoroadenosine-3'-phosphate
  modified_base 6: mod_base = OTHER; note = 2'-deoxy-2'-fluoroguanosine-3'-phosphate
  modified_base 7: mod_base = OTHER; note = 2'-O-methyladenosine-3'-phosphate
  modified_base 8: mod_base = OTHER; note = 2'-deoxy-2'-fluoroadenosine-3'-phosphate
  modified_base 9: mod_base = OTHER; note = 2'-O-methylcytidine-3'-phosphate
  modified_base 10: mod_base = OTHER; note = 2'-O-methyladenosine-3'-phosphate
  modified_base 11: mod_base = OTHER; note = 2'-O-methyluridine-3'-phosphate
  modified_base 12: mod_base = OTHER; note = 2'-deoxy-2'-fluorouridine-3'-phosphate
  modified_base 13: mod_base = OTHER; note = 2'-O-methyluridine-3'-phosphate
  modified_base 14: mod_base = OTHER; note = 2'-deoxy-2'-fluorouridine-3'-phosphate
  modified_base 15: mod_base = OTHER; note = 2'-O-methylguanosine-3'-phosphate
  modified_base 16: mod_base = OTHER; note = 2'-deoxy-2'-fluoroadenosine-3'-phosphate
  modified_base 17: mod_base = OTHER; note = 2'-O-methylcytidine-3'-phosphate
  modified_base 18: mod_base = OTHER; note = 2'-O-methyladenosine-3'-phosphate
  modified_base 19: mod_base = OTHER; note = 2'-O-methylcytidine-3'-phosphate
  modified_base 20: mod_base = OTHER; note = 2'-O-methyladenosine-3'-phosphate
  modified_base 21: mod_base = OTHER; note = 2'-O-methyladenosine-3'-phosphorothioate
  modified_base 22: mod_base = OTHER; note = 2'-O-methyladenosine-3'-phosphorothioate
  modified_base 23: mod_base = OTHER; note = 2'-O-methyladenosine
atgtagaacattttgacacaaaa

SEQ ID NO: 499 - RNA, 23 nt, synthetic construct
  source 1..23: mol_type = other RNA
  modified_base 1: mod_base = OTHER; note = 5'-methyluridine-3'-phosphate
  modified_base 2: mod_base = OTHER; note = 5'-methyluridine-3'-phosphate
  modified_base 3: mod_base = OTHER; note = 5'-methyluridine-3'-phosphate
  modified_base 4: mod_base = OTHER; note = 5'-methyluridine-3'-phosphate
  modified_base 6: mod_base = OTHER; note = 5'-methyluridine-3'-phosphate
  modified_base 8: mod_base = OTHER; note = 5'-methyluridine-3'-phosphate
  modified_base 14: mod_base = OTHER; note = 5'-methyluridine-3'-phosphate
  modified_base 16: mod_base = OTHER; note = 5'-methyluridine-3'-phosphate
  modified_base 17: mod_base = OTHER; note = 5'-methyluridine-3'-phosphate
  modified_base 19: mod_base = OTHER; note = 5'-methyluridine-3'-phosphate
  modified_base 23: mod_base = OTHER; note = 5'-methyluridine
ttttgtgtcaaaatgttctacat

SEQ ID NO: 500 - RNA, 21 nt, synthetic construct
  source 1..21: mol_type = other RNA
  modified_base 1: mod_base = OTHER; note = 2'-O-methylcytidine-3'-phosphorothioate
  modified_base 2: mod_base = OTHER; note = 2'-O-methyladenosine-3'-phosphorothioate
  modified_base 3: mod_base = OTHER; note = 2'-O-methyluridine-3'-phosphate
  modified_base 4: mod_base = OTHER; note = 2'-O-methylguanosine-3'-phosphate
  modified_base 5: mod_base = OTHER; note = 2'-O-methyluridine-3'-phosphate
  modified_base 6: mod_base = OTHER; note = 2'-O-methylguanosine-3'-phosphate
  modified_base 7: mod_base = OTHER; note = 2'-deoxy-2'-fluorocytidine-3'-phosphate
  modified_base 8: mod_base = OTHER; note = 2'-O-methyladenosine-3'-phosphate
  modified_base 9: mod_base = OTHER; note = 2'-deoxy-2'-fluorocytidine-3'-phosphate
  modified_base 10: mod_base = OTHER; note = 2'-deoxy-2'-fluoroadenosine-3'-phosphate
  modified_base 11: mod_base = OTHER; note = 2'-deoxy-2'-fluorouridine-3'-phosphate
  modified_base 12: mod_base = OTHER; note = 2'-O-methyluridine-3'-phosphate
  modified_base 13: mod_base = OTHER; note = 2'-O-methylguanosine-3'-phosphate
  modified_base 14: mod_base = OTHER; note = 2'-O-methyladenosine-3'-phosphate
  modified_base 15: mod_base = OTHER; note = 2'-O-methyladenosine-3'-phosphate
  modified_base 16: mod_base = OTHER; note = 2'-O-methyladenosine-3'-phosphate
  modified_base 17: mod_base = OTHER; note = 2'-O-methyladenosine-3'-phosphate
  modified_base 18: mod_base = OTHER; note = 2'-O-methylcytidine-3'-phosphate
  modified_base 19: mod_base = OTHER; note = 2'-O-methyluridine-3'-phosphate
  modified_base 20: mod_base = OTHER; note = 2'-O-methylguanosine-3'-phosphate
  modified_base 21: mod_base = OTHER; note = 2'-O-methyluridine-3'-phosphate ((2S,4R)-1-[29-[[2-(acetylamino)-2-deoxy-beta-D-galactopyra nosyl]oxy]-14,14-bis[[3-[[3-[[5-[[2-(acetylamino)-2-deoxy-b eta-D-galactopyranosyl]oxy]-1-oxopentyl]amino]propyl]amino] -3-oxopropoxy]methyl]-1,12,19,25-tetraoxo-16-oxa-13,20,24-t riazanonacos-1-yl]-4-hydroxy-2-pyrrolidinyl)methyl ester
catgtgcacattgaaaactgt

SEQ ID NO: 501 - RNA, 23 nt, synthetic construct
  source 1..23: mol_type = other RNA
  modified_base 1: mod_base = OTHER; note = 2'-O-methyladenosine-3'-phosphorothioate
  modified_base 2: mod_base = OTHER; note = 2'-deoxy-2'-fluorocytidine-3'-phosphorothioate
  modified_base 3: mod_base = OTHER; note = 2'-O-methyladenosine-3'-phosphate
  modified_base 4: mod_base = OTHER; note = 2'-O-methylguanosine-3'-phosphate
  modified_base 5: mod_base = OTHER; note = 2'-O-methyluridine-3'-phosphate
  modified_base 6: mod_base = OTHER; note = 2'-deoxy-2'-fluorouridine-3'-phosphate
  modified_base 7: mod_base = OTHER; note = 2'-O-methyluridine-3'-phosphate
  modified_base 8: mod_base = OTHER; note = 2'-deoxy-2'-fluorouridine-3'-phosphate
  modified_base 9: mod_base = OTHER; note = 2'-deoxy-2'-fluorocytidine-3'-phosphate
  modified_base 10: mod_base = OTHER; note = 2'-O-methyladenosine-3'-phosphate
  modified_base 11: mod_base = OTHER; note = 2'-O-methyladenosine-3'-phosphate
  modified_base 12: mod_base = OTHER; note = 2'-O-methyluridine-3'-phosphate
  modified_base 13: mod_base = OTHER; note = 2'-O-methylguanosine-3'-phosphate
  modified_base 14: mod_base = OTHER; note = 2'-deoxy-2'-fluorouridine-3'-phosphate
  modified_base 15: mod_base = OTHER; note = 2'-O-methylguanosine-3'-phosphate
  modified_base 16: mod_base = OTHER; note = 2'-deoxy-2'-fluorocytidine-3'-phosphate
  modified_base 17: mod_base = OTHER; note = 2'-O-methyladenosine-3'-phosphate
  modified_base 18: mod_base = OTHER; note = 2'-O-methylcytidine-3'-phosphate
  modified_base 19: mod_base = OTHER; note = 2'-O-methyladenosine-3'-phosphate
  modified_base 20: mod_base = OTHER; note = 2'-O-methyluridine-3'-phosphate
  modified_base 21: mod_base = OTHER; note = 2'-O-methylguanosine-3'-phosphorothioate
  modified_base 22: mod_base = OTHER; note = 2'-O-methylcytidine-3'-phosphorothioate
  modified_base 23: mod_base = OTHER; note = 2'-O-methylguanosine
acagttttcaatgtgcacatgcg

SEQ ID NO: 502 - RNA, 23 nt, synthetic construct
  source 1..23: mol_type = other RNA
  modified_base 5: mod_base = OTHER; note = 5'-methyluridine-3'-phosphate
  modified_base 7: mod_base = OTHER; note = 5'-methyluridine-3'-phosphate
  modified_base 13: mod_base = OTHER; note = 5'-methyluridine-3'-phosphate
  modified_base 14: mod_base = OTHER; note = 5'-methyluridine-3'-phosphate
  modified_base 21: mod_base = OTHER; note = 5'-methyluridine-3'-phosphate
  modified_base 23: mod_base = OTHER; note = 5'-methyluridine
cgcatgtgcacattgaaaactgt

SEQ ID NO: 503 - RNA, 21 nt, synthetic construct
  source 1..21: mol_type = other RNA
  modified_base 1: mod_base = OTHER; note = 2'-O-methyluridine-3'-phosphorothioate
  modified_base 2: mod_base = OTHER; note = 2'-O-methyluridine-3'-phosphorothioate
  modified_base 3: mod_base = OTHER; note = 2'-O-methylguanosine-3'-phosphate
  modified_base 4: mod_base = OTHER; note = 2'-O-methyluridine-3'-phosphate
  modified_base 5: mod_base = OTHER; note = 2'-deoxy-2'-fluoroguanosine-3'-phosphate
  modified_base 6: mod_base = OTHER; note = 2'-O-methyluridine-3'-phosphate
  modified_base 7: mod_base = OTHER; note = 2'-deoxy-2'-fluorocytidine-3'-phosphate
  modified_base 8: mod_base = OTHER; note = 2'-O-methyladenosine-3'-phosphate
  modified_base 9: mod_base = OTHER; note = 2'-deoxy-2'-fluoroadenosine-3'-phosphate
  modified_base 10: mod_base = OTHER; note = 2'-O-methyladenosine-3'-phosphate
  modified_base 11: mod_base = OTHER; note = 2'-deoxy-2'-fluoroadenosine-3'-phosphate
  modified_base 12: mod_base = OTHER; note = 2'-deoxy-2'-fluorouridine-3'-phosphate
  modified_base 13: mod_base = OTHER; note = 2'-O-methylguanosine-3'-phosphate
  modified_base 14: mod_base = OTHER; note = 2'-O-methyluridine-3'-phosphate
  modified_base 15: mod_base = OTHER; note = 2'-O-methyluridine-3'-phosphate
  modified_base 16: mod_base = OTHER; note = 2'-O-methylcytidine-3'-phosphate
  modified_base 17: mod_base = OTHER; note = 2'-O-methyluridine-3'-phosphate
  modified_base 18: mod_base = OTHER; note = 2'-O-methyladenosine-3'-phosphate
  modified_base 19: mod_base = OTHER; note = 2'-deoxy-2'-fluorocytidine-3'-phosphate
  modified_base 20: mod_base = OTHER; note = 2'-O-methyladenosine-3'-phosphate
  modified_base 21: mod_base = OTHER; note = 2'-deoxy-2'-fluorouridine-3'-phosphate ((2S,4R)-1-[29-[[2-(acetylamino)-2-deoxy-beta-D-galactopyra nosyl]oxy]-14,14-bis[[3-[[3-[[5-[[2-(acetylamino)-2-deoxy-b eta-D-galactopyranosyl]oxy]-1-oxopentyl]amino]propyl]amino] -3-oxopropoxy]methyl]-1,12,19,25-tetraoxo-16-oxa-13,20,24-t riazanonacos-1-yl]-4-hydroxy-2-pyrrolidinyl)methyl ester
ttgtgtcaaaatgttctacat

SEQ ID NO: 504 - RNA, 23 nt, synthetic construct
  source 1..23: mol_type = other RNA
  modified_base 1: mod_base = OTHER; note = 2'-O-methyladenosine-3'-phosphorothioate
  modified_base 2: mod_base = OTHER; note = 2'-deoxy-2'-fluorouridine-3'-phosphorothioate
  modified_base 3: mod_base = OTHER; note = 2'-O-methylguanosine-3'-phosphate
  modified_base 4: mod_base = OTHER; note = 2'-O-methyluridine-3'-phosphate
  modified_base 5: mod_base = OTHER; note = 2'-deoxy-2'-fluoroadenosine-3'-phosphate
  modified_base 6: mod_base = OTHER; note = 2'-deoxy-2'-fluoroguanosine-3'-phosphate
  modified_base 7: mod_base = OTHER; note = 2'-O-methyladenosine-3'-phosphate
  modified_base 8: mod_base = OTHER; note = 2'-deoxy-2'-fluoroadenosine-3'-phosphate
  modified_base 9: mod_base = OTHER; note = 2'-O-methylcytidine-3'-phosphate
  modified_base 10: mod_base = OTHER; note = 2'-O-methyladenosine-3'-phosphate
  modified_base 11: mod_base = OTHER; note = 2'-O-methyluridine-3'-phosphate
  modified_base 12: mod_base = OTHER; note = 2'-deoxy-2'-fluorouridine-3'-phosphate
  modified_base 13: mod_base = OTHER; note = 2'-O-methyluridine-3'-phosphate
  modified_base 14: mod_base = OTHER; note = 2'-deoxy-2'-fluorouridine-3'-phosphate
  modified_base 15: mod_base = OTHER; note = 2'-O-methylguanosine-3'-phosphate
  modified_base 16: mod_base = OTHER; note = 2'-deoxy-2'-fluoroadenosine-3'-phosphate
  modified_base 17: mod_base = OTHER; note = 2'-O-methylcytidine-3'-phosphate
  modified_base 18: mod_base = OTHER; note = 2'-O-methyladenosine-3'-phosphate
  modified_base 19: mod_base = OTHER; note = 2'-O-methylcytidine-3'-phosphate
  modified_base 20: mod_base = OTHER; note = 2'-O-methyladenosine-3'-phosphate
  modified_base 21: mod_base = OTHER; note = 2'-deoxy-2'-fluoroadenosine-3'-phosphorothioate
  modified_base 22: mod_base = OTHER; note = 2'-O-methyladenosine-3'-phosphorothioate
  modified_base 23: mod_base = OTHER; note = 2'-O-methyladenosine
atgtagaacattttgacacaaaa

SEQ ID NO: 505 - RNA, 23 nt, synthetic construct
  source 1..23: mol_type = other RNA
  modified_base 1: mod_base = OTHER; note = 5'-methyluridine-3'-phosphate
  modified_base 2: mod_base = OTHER; note = 5'-methyluridine-3'-phosphate
  modified_base 3: mod_base = OTHER; note = 5'-methyluridine-3'-phosphate
  modified_base 4: mod_base = OTHER; note = 5'-methyluridine-3'-phosphate
  modified_base 6: mod_base = OTHER; note = 5'-methyluridine-3'-phosphate
  modified_base 8: mod_base = OTHER; note = 5'-methyluridine-3'-phosphate
  modified_base 14: mod_base = OTHER; note = 5'-methyluridine-3'-phosphate
  modified_base 16: mod_base = OTHER; note = 5'-methyluridine-3'-phosphate
  modified_base 17: mod_base = OTHER; note = 5'-methyluridine-3'-phosphate
  modified_base 19: mod_base = OTHER; note = 5'-methyluridine-3'-phosphate
  modified_base 23: mod_base = OTHER; note = 5'-methyluridine
ttttgtgtcaaaatgttctacat

SEQ ID NO: 506 - RNA, 21 nt, synthetic construct
  source 1..21: mol_type = other RNA
  modified_base 1: mod_base = OTHER; note = 2'-O-methyluridine-3'-phosphorothioate
  modified_base 2: mod_base = OTHER; note = 2'-O-methylguanosine-3'-phosphorothioate
  modified_base 3: mod_base = OTHER; note = 2'-O-methylguanosine-3'-phosphate
  modified_base 4: mod_base = OTHER; note = 2'-O-methyluridine-3'-phosphate
  modified_base 5: mod_base = OTHER; note = 2'-O-methylcytidine-3'-phosphate
  modified_base 6: mod_base = OTHER; note = 2'-O-methyladenosine-3'-phosphate
  modified_base 7: mod_base = OTHER; note = 2'-deoxy-2'-fluoroguanosine-3'-phosphate
  modified_base 8: mod_base = OTHER; note = 2'-O-methyladenosine-3'-phosphate
  modified_base 9: mod_base = OTHER; note = 2'-deoxy-2'-fluorouridine-3'-phosphate
  modified_base 10: mod_base = OTHER; note = 2'-deoxy-2'-fluorocytidine-3'-phosphate
  modified_base 11: mod_base = OTHER; note = 2'-deoxy-2'-fluorouridine-3'-phosphate
  modified_base 12: mod_base = OTHER; note = 2'-O-methyluridine-3'-phosphate
  modified_base 13: mod_base = OTHER; note = 2'-O-methylcytidine-3'-phosphate
  modified_base 14: mod_base = OTHER; note = 2'-O-methyladenosine-3'-phosphate
  modified_base 15: mod_base = OTHER; note = 2'-O-methyladenosine-3'-phosphate
  modified_base 16: mod_base = OTHER; note = 2'-O-methyladenosine-3'-phosphate
  modified_base 17: mod_base = OTHER; note = 2'-O-methyladenosine-3'-phosphate
  modified_base 18: mod_base = OTHER; note = 2'-O-methyluridine-3'-phosphate
  modified_base 19: mod_base = OTHER; note = 2'-O-methyladenosine-3'-phosphate
  modified_base 20: mod_base = OTHER; note = 2'-O-methyladenosine-3'-phosphate
  modified_base 21: mod_base = OTHER; note = 2'-O-methyladenosine-3'-phosphate ((2S,4R)-1-[29-[[2-(acetylamino)-2-deoxy-beta-D-galactopyra nosyl]oxy]-14,14-bis[[3-[[3-[[5-[[2-(acetylamino)-2-deoxy-b eta-D-galactopyranosyl]oxy]-1-oxopentyl]amino]propyl]amino] -3-oxopropoxy]methyl]-1,12,19,25-tetraoxo-16-oxa-13,20,24-t riazanonacos-1-yl]-4-hydroxy-2-pyrrolidinyl)methyl ester
tggtcagatcttcaaaataaa

SEQ ID NO: 507 - RNA, 23 nt, synthetic construct
  source 1..23: mol_type = other RNA
  modified_base 1: mod_base = OTHER; note = 2'-O-methyluridine-3'-phosphorothioate
  modified_base 2: mod_base = OTHER; note = 2'-deoxy-2'-fluorouridine-3'-phosphorothioate
  modified_base 3: mod_base = OTHER; note = 2'-O-methyluridine-3'-phosphate
  modified_base 4: mod_base = OTHER; note = 2'-O-methyladenosine-3'-phosphate
  modified_base 5: mod_base = OTHER; note = 2'-O-methyluridine-3'-phosphate
  modified_base 6: mod_base = OTHER; note = 2'-deoxy-2'-fluorouridine-3'-phosphate
  modified_base 7: mod_base = OTHER; note = 2'-O-methyluridine-3'-phosphate
  modified_base 8: mod_base = OTHER; note = 2'-deoxy-2'-fluorouridine-3'-phosphate
  modified_base 9: mod_base = OTHER; note = 2'-deoxy-2'-fluoroguanosine-3'-phosphate
  modified_base 10: mod_base = OTHER; note = 2'-O-methyladenosine-3'-phosphate
  modified_base 11: mod_base = OTHER; note = 2'-O-methyladenosine-3'-phosphate
  modified_base 12: mod_base = OTHER; note = 2'-O-methylguanosine-3'-phosphate
  modified_base 13: mod_base = OTHER; note = 2'-O-methyladenosine-3'-phosphate
  modified_base 14: mod_base = OTHER; note = 2'-deoxy-2'-fluorouridine-3'-phosphate
  modified_base 15: mod_base = OTHER; note = 2'-O-methylcytidine-3'-phosphate
  modified_base 16: mod_base = OTHER; note = 2'-deoxy-2'-fluorouridine-3'-phosphate
  modified_base 17: mod_base = OTHER; note = 2'-O-methylguanosine-3'-phosphate
  modified_base 18: mod_base = OTHER; note = 2'-O-methyladenosine-3'-phosphate
  modified_base 19: mod_base = OTHER; note = 2'-O-methylcytidine-3'-phosphate
  modified_base 20: mod_base = OTHER; note = 2'-O-methylcytidine-3'-phosphate
  modified_base 21: mod_base = OTHER; note = 2'-O-methyladenosine-3'-phosphorothioate
  modified_base 22: mod_base = OTHER; note = 2'-O-methyluridine-3'-phosphorothioate
  modified_base 23: mod_base = OTHER; note = 2'-O-methyluridine
tttattttgaagatctgaccatt

SEQ ID NO: 508 - RNA, 23 nt, synthetic construct
  source 1..23: mol_type = other RNA
  modified_base 3: mod_base = OTHER; note = 5'-methyluridine-3'-phosphate
  modified_base 6: mod_base = OTHER; note = 5'-methyluridine-3'-phosphate
  modified_base 11: mod_base = OTHER; note = 5'-methyluridine-3'-phosphate
  modified_base 13: mod_base = OTHER; note = 5'-methyluridine-3'-phosphate
  modified_base 14: mod_base = OTHER; note = 5'-methyluridine-3'-phosphate
  modified_base 20: mod_base = OTHER; note = 5'-methyluridine-3'-phosphate
aatggtcagatcttcaaaataaa

SEQ ID NO: 509 - RNA, 21 nt, synthetic construct
  source 1..21: mol_type = other RNA
  modified_base 1: mod_base = OTHER; note = 2'-O-methyluridine-3'-phosphorothioate
  modified_base 2: mod_base = OTHER; note = 2'-O-methyluridine-3'-phosphorothioate
  modified_base 3: mod_base = OTHER; note = 2'-O-methylguanosine-3'-phosphate
  modified_base 4: mod_base = OTHER; note = 2'-O-methyluridine-3'-phosphate
  modified_base 5: mod_base = OTHER; note = 2'-O-methylguanosine-3'-phosphate
  modified_base 6: mod_base = OTHER; note = 2'-O-methyluridine-3'-phosphate
  modified_base 7: mod_base = OTHER; note = 2'-deoxy-2'-fluorocytidine-3'-phosphate
  modified_base 8: mod_base = OTHER; note = 2'-O-methyladenosine-3'-phosphate
  modified_base 9: mod_base = OTHER; note = 2'-deoxy-2'-fluoroadenosine-3'-phosphate
  modified_base 10: mod_base = OTHER; note = 2'-deoxy-2'-fluoroadenosine-3'-phosphate
  modified_base 11: mod_base = OTHER; note = 2'-deoxy-2'-fluoroadenosine-3'-phosphate
  modified_base 12: mod_base = OTHER; note = 2'-O-methyluridine-3'-phosphate
  modified_base 13: mod_base = OTHER; note = 2'-O-methylguanosine-3'-phosphate
  modified_base 14: mod_base = OTHER; note = 2'-O-hexadecyl-uridine-3'-phosphate
  modified_base 15: mod_base = OTHER; note = 2'-O-methyluridine-3'-phosphate
  modified_base 16: mod_base = OTHER; note = 2'-O-methylcytidine-3'-phosphate
  modified_base 17: mod_base = OTHER; note = 2'-O-methyluridine-3'-phosphate
  modified_base 18: mod_base = OTHER; note = 2'-O-methyladenosine-3'-phosphate
  modified_base 19: mod_base = OTHER; note = 2'-O-methylcytidine-3'-phosphate
  modified_base 20: mod_base = OTHER; note = 2'-O-methyladenosine-3'-phosphate
  modified_base 21: mod_base = OTHER; note = 2'-O-methyluridine-3'-phosphate ((2S,4R)-1-[29-[[2-(acetylamino)-2-deoxy-beta-D-galactopyra nosyl]oxy]-14,14-bis[[3-[[3-[[5-[[2-(acetylamino)-2-deoxy-b eta-D-galactopyranosyl]oxy]-1-oxopentyl]amino]propyl]amino] -3-oxopropoxy]methyl]-1,12,19,25-tetraoxo-16-oxa-13,20,24-t riazanonacos-1-yl]-4-hydroxy-2-pyrrolidinyl)methyl ester
ttgtgtcaaaatgttctacat

SEQ ID NO: 510 - RNA, 23 nt, synthetic construct
  source 1..23: mol_type = other RNA
  modified_base 1: mod_base = OTHER; note = 2'-O-methyladenosine-3'-phosphorothioate
  modified_base 2: mod_base = OTHER; note = 2'-deoxy-2'-fluorouridine-3'-phosphorothioate
  modified_base 3: mod_base = OTHER; note = 2'-O-methylguanosine-3'-phosphate
  modified_base 4: mod_base = OTHER; note = 2'-O-methyluridine-3'-phosphate
  modified_base 5: mod_base = OTHER; note = 2'-O-methyladenosine-3'-phosphate
  modified_base 6: mod_base = OTHER; note = 2'-deoxy-2'-fluoroguanosine-3'-phosphate
  modified_base 7: mod_base = OTHER; note = 2'-O-methyladenosine-3'-phosphate
  modified_base 8: mod_base = OTHER; note = 2'-deoxy-2'-fluoroadenosine-3'-phosphate
  modified_base 9: mod_base = OTHER; note = 2'-deoxy-2'-fluorocytidine-3'-phosphate
  modified_base 10: mod_base = OTHER; note = 2'-O-methyladenosine-3'-phosphate
  modified_base 11: mod_base = OTHER; note = 2'-O-methyluridine-3'-phosphate
  modified_base 12: mod_base = OTHER; note = 2'-O-methyluridine-3'-phosphate
  modified_base 13: mod_base = OTHER; note = 2'-O-methyluridine-3'-phosphate
  modified_base 14: mod_base = OTHER; note = 2'-deoxy-2'-fluorouridine-3'-phosphate
  modified_base 15: mod_base = OTHER; note = 2'-O-methylguanosine-3'-phosphate
  modified_base 16: mod_base = OTHER; note = 2'-deoxy-2'-fluoroadenosine-3'-phosphate
  modified_base 17: mod_base = OTHER; note = 2'-O-methylcytidine-3'-phosphate
  modified_base 18: mod_base = OTHER; note = 2'-O-methyladenosine-3'-phosphate
  modified_base 19: mod_base = OTHER; note = 2'-O-methylcytidine-3'-phosphate
  modified_base 20: mod_base = OTHER; note = 2'-O-methyladenosine-3'-phosphate
  modified_base 21: mod_base = OTHER; note = 2'-O-methyladenosine-3'-phosphorothioate
  modified_base 22: mod_base = OTHER; note = 2'-O-methyladenosine-3'-phosphorothioate
  modified_base 23: mod_base = OTHER; note = 2'-O-methyladenosine
atgtagaacattttgacacaaaa

SEQ ID NO: 511 - RNA, 23 nt, synthetic construct
  source 1..23: mol_type = other RNA
  modified_base 1: mod_base = OTHER; note = 5'-methyluridine-3'-phosphate
  modified_base 2: mod_base = OTHER; note = 5'-methyluridine-3'-phosphate
  modified_base 3: mod_base = OTHER; note = 5'-methyluridine-3'-phosphate
  modified_base 4: mod_base = OTHER; note = 5'-methyluridine-3'-phosphate
  modified_base 6: mod_base = OTHER; note = 5'-methyluridine-3'-phosphate
  modified_base 8: mod_base = OTHER; note = 5'-methyluridine-3'-phosphate
  modified_base 14: mod_base = OTHER; note = 5'-methyluridine-3'-phosphate
  modified_base 16: mod_base = OTHER; note = 5'-methyluridine-3'-phosphate
  modified_base 17: mod_base = OTHER; note = 5'-methyluridine-3'-phosphate
  modified_base 19: mod_base = OTHER; note = 5'-methyluridine-3'-phosphate
  modified_base 23: mod_base = OTHER; note = 5'-methyluridine
ttttgtgtcaaaatgttctacat

SEQ ID NO: 512 - RNA, 21 nt, synthetic construct
  source 1..21: mol_type = other RNA
  modified_base 1: mod_base = OTHER; note = 2'-O-methyluridine-3'-phosphorothioate
  modified_base 2: mod_base = OTHER; note = 2'-O-methyluridine-3'-phosphorothioate
  modified_base 3: mod_base = OTHER; note = 2'-O-methylguanosine-3'-phosphate
  modified_base 4: mod_base = OTHER; note = 2'-O-methyluridine-3'-phosphate
  modified_base 5: mod_base = OTHER; note = 2'-O-methylguanosine-3'-phosphate
  modified_base 6: mod_base = OTHER; note = 2'-O-methyluridine-3'-phosphate
  modified_base 7: mod_base = OTHER; note = 2'-deoxy-2'-fluorocytidine-3'-phosphate
  modified_base 8: mod_base = OTHER; note = 2'-O-methyladenosine-3'-phosphate
  modified_base 9: mod_base = OTHER; note = 2'-deoxy-2'-fluoroadenosine-3'-phosphate
  modified_base 10: mod_base = OTHER; note = 2'-deoxy-2'-fluoroadenosine-3'-phosphate
  modified_base 11: mod_base = OTHER; note = 2'-deoxy-2'-fluoroadenosine-3'-phosphate
  modified_base 12: mod_base = OTHER; note = 2'-O-methyluridine-3'-phosphate
  modified_base 13: mod_base = OTHER; note = 2'-O-methylguanosine-3'-phosphate
  modified_base 14: mod_base = OTHER; note = 2'-O-methyluridine-3'-phosphate
  modified_base 15: mod_base = OTHER; note = 2'-O-methyluridine-3'-phosphate
  modified_base 16: mod_base = OTHER; note = 2'-O-methylcytidine-3'-phosphate
  modified_base 17: mod_base = OTHER; note = 2'-O-methyluridine-3'-phosphate
  modified_base 18: mod_base = OTHER; note = 2'-O-methyladenosine-3'-phosphate
  modified_base 19: mod_base = OTHER; note = 2'-O-methylcytidine-3'-phosphate
  modified_base 20: mod_base = OTHER; note = 2'-O-methyladenosine-3'-phosphate
  modified_base 21: mod_base = OTHER; note = 3'-O-methyluridine-2'-phosphate ((2S,4R)-1-[29-[[2-(acetylamino)-2-deoxy-beta-D-galactopyra nosyl]oxy]-14,14-bis[[3-[[3-[[5-[[2-(acetylamino)-2-deoxy-b eta-D-galactopyranosyl]oxy]-1-oxopentyl]amino]propyl]amino] -3-oxopropoxy]methyl]-1,12,19,25-tetraoxo-16-oxa-13,20,24-t riazanonacos-1-yl]-4-hydroxy-2-pyrrolidinyl)methyl ester
ttgtgtcaaaatgttctacat

SEQ ID NO: 513 - RNA, 23 nt, synthetic construct
  source 1..23: mol_type = other RNA
  modified_base 1: mod_base = OTHER; note = 2'-O-methyladenosine-3'-phosphorothioate
  modified_base 2: mod_base = OTHER; note = 2'-deoxy-2'-fluorouridine-3'-phosphorothioate
  modified_base 3: mod_base = OTHER; note = 2'-O-methylguanosine-3'-phosphate
  modified_base 4: mod_base = OTHER; note = 2'-O-methyluridine-3'-phosphate
  modified_base 5: mod_base = OTHER; note = 2'-O-methyladenosine-3'-phosphate
  modified_base 6: mod_base = OTHER; note = 2'-deoxy-2'-fluoroguanosine-3'-phosphate
  modified_base 7: mod_base = OTHER; note = 2'-O-methyladenosine-3'-phosphate
  modified_base 8: mod_base = OTHER; note = 2'-deoxy-2'-fluoroadenosine-3'-phosphate
  modified_base 9: mod_base = OTHER; note = 2'-deoxy-2'-fluorocytidine-3'-phosphate
  modified_base 10: mod_base = OTHER; note = 2'-O-methyladenosine-3'-phosphate
  modified_base 11: mod_base = OTHER; note = 2'-O-methyluridine-3'-phosphate
  modified_base 12: mod_base = OTHER; note = 2'-O-methyluridine-3'-phosphate
  modified_base 13: mod_base = OTHER; note = 2'-O-methyluridine-3'-phosphate
  modified_base 14: mod_base = OTHER; note = 2'-deoxy-2'-fluorouridine-3'-phosphate
  modified_base 15: mod_base = OTHER; note = 2'-O-methylguanosine-3'-phosphate
  modified_base 16: mod_base = OTHER; note = 2'-deoxy-2'-fluoroadenosine-3'-phosphate
  modified_base 17: mod_base = OTHER; note = 2'-O-methylcytidine-3'-phosphate
  modified_base 18: mod_base = OTHER; note = 2'-O-methyladenosine-3'-phosphate
  modified_base 19: mod_base = OTHER; note = 2'-O-methylcytidine-3'-phosphate
  modified_base 20: mod_base = OTHER; note = 2'-O-methyladenosine-3'-phosphate
  modified_base 21: mod_base = OTHER; note = 2'-O-methyladenosine-3'-phosphorothioate
  modified_base 22: mod_base = OTHER; note = 2'-O-methyladenosine-3'-phosphorothioate
  modified_base 23: mod_base = OTHER; note = 2'-O-methyladenosine
atgtagaacattttgacacaaaa

SEQ ID NO: 514 - RNA, 23 nt, synthetic construct
  source 1..23: mol_type = other RNA
  modified_base 1: mod_base = OTHER; note = 5'-methyluridine-3'-phosphate
  modified_base 2: mod_base = OTHER; note = 5'-methyluridine-3'-phosphate
  modified_base 3: mod_base = OTHER; note = 5'-methyluridine-3'-phosphate
  modified_base 4: mod_base = OTHER; note = 5'-methyluridine-3'-phosphate
  modified_base 6: mod_base = OTHER; note = 5'-methyluridine-3'-phosphate
  modified_base 8: mod_base = OTHER; note = 5'-methyluridine-3'-phosphate
  modified_base 14: mod_base = OTHER; note = 5'-methyluridine-3'-phosphate
  modified_base 16: mod_base = OTHER; note = 5'-methyluridine-3'-phosphate
  modified_base 17: mod_base = OTHER; note = 5'-methyluridine-3'-phosphate
  modified_base 19: mod_base = OTHER; note = 5'-methyluridine-3'-phosphate
  modified_base 23: mod_base = OTHER; note = 5'-methyluridine
ttttgtgtcaaaatgttctacat

SEQ ID NO: 515 - RNA, 21 nt, synthetic construct
  source 1..21: mol_type = other RNA
  modified_base 1: mod_base = OTHER; note = 2'-O-methylcytidine-3'-phosphorothioate
  modified_base 2: mod_base = OTHER; note = 2'-O-methyladenosine-3'-phosphorothioate
  modified_base 3: mod_base = OTHER; note = 2'-O-methyladenosine-3'-phosphate
  modified_base 4: mod_base = OTHER; note = 2'-O-methyluridine-3'-phosphate
  modified_base 5: mod_base = OTHER; note = 2'-O-methylguanosine-3'-phosphate
  modified_base 6: mod_base = OTHER; note = 2'-O-methylguanosine-3'-phosphate
  modified_base 7: mod_base = OTHER; note = 2'-deoxy-2'-fluorouridine-3'-phosphate
  modified_base 8: mod_base = OTHER; note = 2'-O-methylcytidine-3'-phosphate
  modified_base 9: mod_base = OTHER; note = 2'-deoxy-2'-fluoroadenosine-3'-phosphate
  modified_base 10: mod_base = OTHER; note = 2'-deoxy-2'-fluoroguanosine-3'-phosphate
  modified_base 11: mod_base = OTHER; note = 2'-deoxy-2'-fluoroadenosine-3'-phosphate
  modified_base 12: mod_base = OTHER; note = 2'-O-methyluridine-3'-phosphate
  modified_base 13: mod_base = OTHER; note = 2'-O-methylcytidine-3'-phosphate
  modified_base 14: mod_base = OTHER; note = 2'-O-methyluridine-3'-phosphate
  modified_base 15: mod_base = OTHER; note = 2'-O-methyluridine-3'-phosphate
  modified_base 16: mod_base = OTHER; note = 2'-O-methylcytidine-3'-phosphate
  modified_base 17: mod_base = OTHER; note = 2'-O-methyladenosine-3'-phosphate
  modified_base 18: mod_base = OTHER; note = 2'-O-methyladenosine-3'-phosphate
  modified_base 19: mod_base = OTHER; note = 2'-O-methyladenosine-3'-phosphate
  modified_base 20: mod_base = OTHER; note = 2'-O-methyladenosine-3'-phosphate
  modified_base 21: mod_base = OTHER; note = 2'-O-methyluridine-3'-phosphate ((2S,4R)-1-[29-[[2-(acetylamino)-2-deoxy-beta-D-galactopyra nosyl]oxy]-14,14-bis[[3-[[3-[[5-[[2-(acetylamino)-2-deoxy-b eta-D-galactopyranosyl]oxy]-1-oxopentyl]amino]propyl]amino] -3-oxopropoxy]methyl]-1,12,19,25-tetraoxo-16-oxa-13,20,24-t riazanonacos-1-yl]-4-hydroxy-2-pyrrolidinyl)methyl ester
caatggtcagatcttcaaaat

SEQ ID NO: 516 - RNA, 23 nt, synthetic construct
  source 1..23: mol_type = other RNA
  modified_base 1: mod_base = OTHER; note = 2'-O-methyladenosine-3'-phosphorothioate
  modified_base 2: mod_base = OTHER; note = 2'-deoxy-2'-fluorouridine-3'-phosphorothioate
  modified_base 3: mod_base = OTHER; note = 2'-O-methyluridine-3'-phosphate
  modified_base 4: mod_base = OTHER; note = 2'-O-methyluridine-3'-phosphate
  modified_base 5: mod_base = OTHER; note = 2'-O-methyluridine-3'-phosphate
  modified_base 6: mod_base = OTHER; note = 2'-deoxy-2'-fluoroguanosine-3'-phosphate
  modified_base 7: mod_base = OTHER; note = 2'-O-methyladenosine-3'-phosphate
  modified_base 8: mod_base = OTHER; note = 2'-deoxy-2'-fluoroadenosine-3'-phosphate
  modified_base 9: mod_base = OTHER; note = 2'-deoxy-2'-fluoroguanosine-3'-phosphate
  modified_base 10: mod_base = OTHER; note = 2'-O-methyladenosine-3'-phosphate
  modified_base 11: mod_base = OTHER; note = 2'-O-methyluridine-3'-phosphate
  modified_base 12: mod_base = OTHER; note = 2'-O-methylcytidine-3'-phosphate
  modified_base 13: mod_base = OTHER; note = 2'-O-methyluridine-3'-phosphate
  modified_base 14: mod_base = OTHER; note = 2'-deoxy-2'-fluoroguanosine-3'-phosphate
  modified_base 15: mod_base = OTHER; note = 2'-O-methyladenosine-3'-phosphate
  modified_base 16: mod_base = OTHER; note = 2'-deoxy-2'-fluorocytidine-3'-phosphate
  modified_base 17: mod_base = OTHER; note = 2'-O-methylcytidine-3'-phosphate
  modified_base 18: mod_base = OTHER; note = 2'-O-methyladenosine-3'-phosphate
  modified_base 19: mod_base = OTHER; note = 2'-O-methyluridine-3'-phosphate
  modified_base 20: mod_base = OTHER; note = 2'-O-methyluridine-3'-phosphate
  modified_base 21: mod_base = OTHER; note = 2'-O-methylguanosine-3'-phosphorothioate
  modified_base 22: mod_base = OTHER; note = 2'-O-methylguanosine-3'-phosphorothioate
  modified_base 23: mod_base = OTHER; note = 2'-O-methylcytidine
attttgaagatctgaccattggc

SEQ ID NO: 517 - RNA, 23 nt, synthetic construct
  source 1..23: mol_type = other RNA
  modified_base 6: mod_base = OTHER; note = 5'-methyluridine-3'-phosphate
  modified_base 9: mod_base = OTHER; note = 5'-methyluridine-3'-phosphate
  modified_base 14: mod_base = OTHER; note = 5'-methyluridine-3'-phosphate
  modified_base 16: mod_base = OTHER; note = 5'-methyluridine-3'-phosphate
  modified_base 17: mod_base = OTHER; note = 5'-methyluridine-3'-phosphate
  modified_base 23: mod_base = OTHER; note = 5'-methyluridine
gccaatggtcagatcttcaaaat

SEQ ID NO: 518 - RNA, 21 nt, synthetic construct
  source 1..21: mol_type = other RNA
  modified_base 1: mod_base = OTHER; note = 2'-O-methyluridine-3'-phosphorothioate
  modified_base 2: mod_base = OTHER; note = 2'-O-methyluridine-3'-phosphorothioate
  modified_base 3: mod_base = OTHER; note = 2'-deoxy-2'-fluoroguanosine-3'-phosphate
  modified_base 4: mod_base = OTHER; note = 2'-O-methyluridine-3'-phosphate
  modified_base 5: mod_base = OTHER; note = 2'-deoxy-2'-fluoroguanosine-3'-phosphate
  modified_base 6: mod_base = OTHER; note = 2'-O-methyluridine-3'-phosphate
  modified_base 7: mod_base = OTHER; note = 2'-deoxy-2'-fluorocytidine-3'-phosphate
  modified_base 8: mod_base = OTHER; note = 2'-O-methyladenosine-3'-phosphate
  modified_base 9: mod_base = OTHER; note = 2'-deoxy-2'-fluoroadenosine-3'-phosphate
  modified_base 10: mod_base = OTHER; note = 2'-deoxy-2'-fluoroadenosine-3'-phosphate
  modified_base 11: mod_base = OTHER; note = 2'-deoxy-2'-fluoroadenosine-3'-phosphate
  modified_base 12: mod_base = OTHER; note = 2'-O-methyluridine-3'-phosphate
  modified_base 13: mod_base = OTHER; note = 2'-deoxy-2'-fluoroguanosine-3'-phosphate
  modified_base 14: mod_base = OTHER; note = 2'-O-methyluridine-3'-phosphate
  modified_base 15: mod_base = OTHER; note = 2'-deoxy-2'-fluorouridine-3'-phosphate
  modified_base 16: mod_base = OTHER; note = 2'-O-methylcytidine-3'-phosphate
  modified_base 17: mod_base = OTHER; note = 2'-deoxy-2'-fluorouridine-3'-phosphate
  modified_base 18: mod_base = OTHER; note = 2'-O-methyladenosine-3'-phosphate
  modified_base 19: mod_base = OTHER; note = 2'-deoxy-2'-fluorocytidine-3'-phosphate
  modified_base 20: mod_base = OTHER; note = 2'-O-methyladenosine-3'-phosphate
  modified_base 21: mod_base = OTHER; note = 2'-O-methyluridine-3'-phosphate ((2S,4R)-1-[29-[[2-(acetylamino)-2-deoxy-beta-D-galactopyra nosyl]oxy]-14,14-bis[[3-[[3-[[5-[[2-(acetylamino)-2-deoxy-b eta-D-galactopyranosyl]oxy]-1-oxopentyl]amino]propyl]amino] -3-oxopropoxy]methyl]-1,12,19,25-tetraoxo-16-oxa-13,20,24-t riazanonacos-1-yl]-4-hydroxy-2-pyrrolidinyl)methyl ester
ttgtgtcaaaatgttctacat

SEQ ID NO: 519 - RNA, 23 nt, synthetic construct
  source 1..23: mol_type = other RNA
  modified_base 1: mod_base = OTHER; note = 2'-O-methyladenosine-3'-phosphorothioate
  modified_base 2: mod_base = OTHER; note = 2'-deoxy-2'-fluorouridine-3'-phosphorothioate
  modified_base 3: mod_base = OTHER; note = 2'-O-methylguanosine-3'-phosphate
  modified_base 4: mod_base = OTHER; note = 2'-deoxy-2'-fluorouridine-3'-phosphate
  modified_base 5: mod_base = OTHER; note = 2'-O-methyladenosine-3'-phosphate
  modified_base 6: mod_base = OTHER; note = 2'-deoxy-2'-fluoroguanosine-3'-phosphate
  modified_base 7: mod_base = OTHER; note = 2'-O-methyladenosine-3'-phosphate
  modified_base 8: mod_base = OTHER; note = 2'-deoxy-2'-fluoroadenosine-3'-phosphate
  modified_base 9: mod_base = OTHER; note = 2'-O-methylcytidine-3'-phosphate
  modified_base 10: mod_base = OTHER; note = 2'-deoxy-2'-fluoroadenosine-3'-phosphate
  modified_base 11: mod_base = OTHER; note = 2'-O-methyluridine-3'-phosphate
  modified_base 12: mod_base = OTHER; note = 2'-deoxy-2'-fluorouridine-3'-phosphate
  modified_base 13: mod_base = OTHER; note = 2'-O-methyluridine-3'-phosphate
  modified_base 14: mod_base = OTHER; note = 2'-deoxy-2'-fluorouridine-3'-phosphate
  modified_base 15: mod_base = OTHER; note = 2'-O-methylguanosine-3'-phosphate
  modified_base 16: mod_base = OTHER; note = 2'-deoxy-2'-fluoroadenosine-3'-phosphate
  modified_base 17: mod_base = OTHER; note = 2'-O-methylcytidine-3'-phosphate
  modified_base 18: mod_base = OTHER; note = 2'-deoxy-2'-fluoroadenosine-3'-phosphate
  modified_base 19: mod_base = OTHER; note = 2'-O-methylcytidine-3'-phosphate
  modified_base 20: mod_base = OTHER; note = 2'-deoxy-2'-fluoroadenosine-3'-phosphate
  modified_base 21: mod_base = OTHER; note = 2'-O-methyladenosine-3'-phosphorothioate
  modified_base 22: mod_base = OTHER; note = 2'-O-methyladenosine-3'-phosphorothioate
  modified_base 23: mod_base = OTHER; note = 2'-O-methyladenosine
atgtagaacattttgacacaaaa

SEQ ID NO: 520 - RNA, 23 nt, synthetic construct
  source 1..23: mol_type = other RNA
  modified_base 1: mod_base = OTHER; note = 5'-methyluridine-3'-phosphate
  modified_base 2: mod_base = OTHER; note = 5'-methyluridine-3'-phosphate
  modified_base 3: mod_base = OTHER; note = 5'-methyluridine-3'-phosphate
  modified_base 4: mod_base = OTHER; note = 5'-methyluridine-3'-phosphate
  modified_base 6: mod_base = OTHER; note = 5'-methyluridine-3'-phosphate
  modified_base 8: mod_base = OTHER; note = 5'-methyluridine-3'-phosphate
  modified_base 14: mod_base = OTHER; note = 5'-methyluridine-3'-phosphate
  modified_base 16: mod_base = OTHER; note = 5'-methyluridine-3'-phosphate
  modified_base 17: mod_base = OTHER; note = 5'-methyluridine-3'-phosphate
  modified_base 19: mod_base = OTHER; note = 5'-methyluridine-3'-phosphate
  modified_base 23: mod_base = OTHER; note = 5'-methyluridine
ttttgtgtcaaaatgttctacat

SEQ ID NO: 521 - RNA, 21 nt, synthetic construct
  source 1..21: mol_type = other RNA
  modified_base 1: mod_base = OTHER; note = 2'-O-methyladenosine-3'-phosphorothioate
  modified_base 2: mod_base = OTHER; note = 2'-O-methyluridine-3'-phosphorothioate
  modified_base 3: mod_base = OTHER; note = 2'-O-methylguanosine-3'-phosphate
  modified_base 4: mod_base = OTHER; note = 2'-O-methylguanosine-3'-phosphate
  modified_base 5: mod_base = OTHER; note = 2'-O-methyluridine-3'-phosphate
  modified_base 6: mod_base = OTHER; note = 2'-O-methylcytidine-3'-phosphate
  modified_base 7: mod_base = OTHER; note = 2'-deoxy-2'-fluoroadenosine-3'-phosphate
  modified_base 8: mod_base = OTHER; note = 2'-O-methylguanosine-3'-phosphate
  modified_base 9: mod_base = OTHER; note = 2'-deoxy-2'-fluoroadenosine-3'-phosphate
  modified_base 10: mod_base = OTHER; note = 2'-deoxy-2'-fluorouridine-3'-phosphate
  modified_base 11: mod_base = OTHER; note = 2'-deoxy-2'-fluorocytidine-3'-phosphate
  modified_base 12: mod_base = OTHER; note = 2'-O-methyluridine-3'-phosphate
  modified_base 13: mod_base = OTHER; note = 2'-O-methyluridine-3'-phosphate
  modified_base 14: mod_base = OTHER; note = 2'-O-methylcytidine-3'-phosphate
  modified_base 15: mod_base = OTHER; note = 2'-O-methyladenosine-3'-phosphate
  modified_base 16: mod_base = OTHER; note = 2'-O-methyladenosine-3'-phosphate
  modified_base 17: mod_base = OTHER; note = 2'-O-methyladenosine-3'-phosphate
  modified_base 18: mod_base = OTHER; note = 2'-O-methyladenosine-3'-phosphate
  modified_base 19: mod_base = OTHER; note = 2'-O-methyluridine-3'-phosphate
  modified_base 20: mod_base = OTHER; note = 2'-O-methyladenosine-3'-phosphate
  modified_base 21: mod_base = OTHER; note = 3'-O-methyladenosine-2'-phosphate ((2S,4R)-1-[29-[[2-(acetylamino)-2-deoxy-beta-D-galactopyra nosyl]oxy]-14,14-bis[[3-[[3-[[5-[[2-(acetylamino)-2-deoxy-b eta-D-galactopyranosyl]oxy]-1-oxopentyl]amino]propyl]amino] -3-oxopropoxy]methyl]-1,12,19,25-tetraoxo-16-oxa-13,20,24-t riazanonacos-1-yl]-4-hydroxy-2-pyrrolidinyl)methyl ester
atggtcagatcttcaaaataa

SEQ ID NO: 522 - RNA, 23 nt, synthetic construct
  source 1..23: mol_type = other RNA
  modified_base 1: mod_base = OTHER; note = 2'-O-methyluridine-3'-phosphorothioate
  modified_base 2: mod_base = OTHER; note = 2'-deoxy-2'-fluorouridine-3'-phosphorothioate
  modified_base 3: mod_base = OTHER; note = 2'-O-methyladenosine-3'-phosphate
  modified_base 4: mod_base = OTHER; note = 2'-O-methyluridine-3'-phosphate
  modified_base 5: mod_base = OTHER; note = 2'-O-methyluridine-3'-phosphate
  modified_base 6: mod_base = OTHER; note = 2'-deoxy-2'-fluorouridine-3'-phosphate
  modified_base 7: mod_base = OTHER; note = 2'-O-methyluridine-3'-phosphate
  modified_base 8: mod_base = OTHER; note = 2'-deoxy-2'-fluoroguanosine-3'-phosphate
  modified_base 9: mod_base = OTHER; note = 2'-deoxy-2'-fluoroadenosine-3'-phosphate
  modified_base 10: mod_base = OTHER; note = 2'-O-methyladenosine-3'-phosphate
  modified_base 11: mod_base = OTHER; note = 2'-O-methylguanosine-3'-phosphate
  modified_base 12: mod_base = OTHER; note = 2'-O-methyladenosine-3'-phosphate
  modified_base 13: mod_base = OTHER; note = 2'-O-methyluridine-3'-phosphate
  modified_base 14: mod_base = OTHER; note = 2'-deoxy-2'-fluorocytidine-3'-phosphate
  modified_base 15: mod_base = OTHER; note = 2'-O-methyluridine-3'-phosphate
  modified_base 16: mod_base = OTHER; note = 2'-deoxy-2'-fluoroguanosine-3'-phosphate
  modified_base 17: mod_base = OTHER; note = 2'-O-methyladenosine-3'-phosphate
  modified_base 18: mod_base = OTHER; note = 2'-O-methylcytidine-3'-phosphate
  modified_base 19: mod_base = OTHER; note = 2'-O-methylcytidine-3'-phosphate
  modified_base 20: mod_base = OTHER; note = 2'-O-methyladenosine-3'-phosphate
  modified_base 21: mod_base = OTHER; note = 2'-O-methyluridine-3'-phosphorothioate
  modified_base 22: mod_base = OTHER; note = 2'-O-methyluridine-3'-phosphorothioate
  modified_base 23: mod_base = OTHER; note = 2'-O-methylguanosine
ttattttgaagatctgaccattg

SEQ ID NO: 523 - RNA, 23 nt, synthetic construct
  source 1..23: mol_type = other RNA
  modified_base 4: mod_base = OTHER; note = 5'-methyluridine-3'-phosphate
  modified_base 7: mod_base = OTHER; note = 5'-methyluridine-3'-phosphate
  modified_base 12: mod_base = OTHER; note = 5'-methyluridine-3'-phosphate
  modified_base 14: mod_base = OTHER; note = 5'-methyluridine-3'-phosphate
  modified_base 15: mod_base = OTHER; note = 5'-methyluridine-3'-phosphate
  modified_base 21: mod_base = OTHER; note = 5'-methyluridine-3'-phosphate
caatggtcagatcttcaaaataa

SEQ ID NO: 524 - RNA, 21 nt, synthetic construct
  source 1..21: mol_type = other RNA
  modified_base 1: mod_base = OTHER; note = 2'-O-methyladenosine-3'-phosphorothioate
  modified_base 2: mod_base = OTHER; note = 2'-O-methyluridine-3'-phosphorothioate
  modified_base 3: mod_base = OTHER; note = 2'-deoxy-2'-fluoroguanosine-3'-phosphate
  modified_base 4: mod_base = OTHER; note = 2'-O-methylguanosine-3'-phosphate
  modified_base 5: mod_base = OTHER; note = 2'-deoxy-2'-fluorouridine-3'-phosphate
  modified_base 6: mod_base = OTHER; note = 2'-O-methylcytidine-3'-phosphate
  modified_base 7: mod_base = OTHER; note = 2'-deoxy-2'-fluoroadenosine-3'-phosphate
  modified_base 8: mod_base = OTHER; note = 2'-O-methylguanosine-3'-phosphate
  modified_base 9: mod_base = OTHER; note = 2'-deoxy-2'-fluoroadenosine-3'-phosphate
  modified_base 10: mod_base = OTHER; note = 2'-deoxy-2'-fluorouridine-3'-phosphate
  modified_base 11: mod_base = OTHER; note = 2'-deoxy-2'-fluorocytidine-3'-phosphate
  modified_base 12: mod_base = OTHER; note = 2'-O-methyluridine-3'-phosphate
  modified_base 13: mod_base = OTHER; note = 2'-deoxy-2'-fluorouridine-3'-phosphate
  modified_base 14: mod_base = OTHER; note = 2'-O-methylcytidine-3'-phosphate
  modified_base 15: mod_base = OTHER; note = 2'-deoxy-2'-fluoroadenosine-3'-phosphate
  modified_base 16: mod_base = OTHER; note = 2'-O-methyladenosine-3'-phosphate
  modified_base 17: mod_base = OTHER; note = 2'-deoxy-2'-fluoroadenosine-3'-phosphate
  modified_base 18: mod_base = OTHER; note = 2'-O-methyladenosine-3'-phosphate
  modified_base 19: mod_base = OTHER; note = 2'-deoxy-2'-fluorouridine-3'-phosphate
  modified_base 20: mod_base = OTHER; note = 2'-O-methyladenosine-3'-phosphate
  modified_base 21: mod_base = OTHER; note = 2'-O-methyladenosine-3'-phosphate ((2S,4R)-1-[29-[[2-(acetylamino)-2-deoxy-beta-D-galactopyra nosyl]oxy]-14,14-bis[[3-[[3-[[5-[[2-(acetylamino)-2-deoxy-b eta-D-galactopyranosyl]oxy]-1-oxopentyl]amino]propyl]amino] -3-oxopropoxy]methyl]-1,12,19,25-tetraoxo-16-oxa-13,20,24-t riazanonacos-1-yl]-4-hydroxy-2-pyrrolidinyl)methyl ester
atggtcagatcttcaaaataa

SEQ ID NO: 525 - RNA, 23 nt, synthetic construct
  source 1..23: mol_type = other RNA
  modified_base 1: mod_base = OTHER; note = 2'-O-methyluridine-3'-phosphorothioate
  modified_base 2: mod_base = OTHER; note = 2'-deoxy-2'-fluorouridine-3'-phosphorothioate
  modified_base 3: mod_base = OTHER; note = 2'-O-methyladenosine-3'-phosphate
  modified_base 4: mod_base = OTHER; note = 2'-deoxy-2'-fluorouridine-3'-phosphate
  modified_base 5: mod_base = OTHER; note = 2'-O-methyluridine-3'-phosphate
  modified_base 6: mod_base = OTHER; note = 2'-deoxy-2'-fluorouridine-3'-phosphate
  modified_base 7: mod_base = OTHER; note = 2'-O-methyluridine-3'-phosphate
  modified_base 8: mod_base = OTHER; note = 2'-deoxy-2'-fluoroguanosine-3'-phosphate
  modified_base 9: mod_base = OTHER; note = 2'-O-methyladenosine-3'-phosphate
  modified_base 10: mod_base = OTHER; note = 2'-deoxy-2'-fluoroadenosine-3'-phosphate
  modified_base 11: mod_base = OTHER; note = 2'-O-methylguanosine-3'-phosphate
  modified_base 12: mod_base = OTHER; note = 2'-O-methyladenosine-3'-phosphate
  modified_base 13: mod_base = OTHER; note = 2'-O-methyluridine-3'-phosphate
  modified_base 14: mod_base = OTHER; note = 2'-deoxy-2'-fluorocytidine-3'-phosphate
  modified_base 15: mod_base = OTHER; note = 2'-O-methyluridine-3'-phosphate
  modified_base 16: mod_base = OTHER; note = 2'-deoxy-2'-fluoroguanosine-3'-phosphate
  modified_base 17: mod_base = OTHER; note = 2'-O-methyladenosine-3'-phosphate
  modified_base 18: mod_base = OTHER; note = 2'-deoxy-2'-fluorocytidine-3'-phosphate
  modified_base 19: mod_base = OTHER; note = 2'-O-methylcytidine-3'-phosphate
  modified_base 20: mod_base = OTHER; note = 2'-deoxy-2'-fluoroadenosine-3'-phosphate
  modified_base 21: mod_base = OTHER; note = 2'-O-methyluridine-3'-phosphorothioate
  modified_base 22: mod_base = OTHER; note = 2'-O-methyluridine-3'-phosphorothioate
  modified_base 23: mod_base = OTHER; note = 2'-O-methylguanosine
ttattttgaagatctgaccattg

SEQ ID NO: 526 - RNA, 23 nt, synthetic construct
  source 1..23: mol_type = other RNA
  modified_base 4: mod_base = OTHER; note = 5'-methyluridine-3'-phosphate
  modified_base 7: mod_base = OTHER; note = 5'-methyluridine-3'-phosphate
  modified_base 12: mod_base = OTHER; note = 5'-methyluridine-3'-phosphate
  modified_base 14: mod_base = OTHER; note = 5'-methyluridine-3'-phosphate
  modified_base 15: mod_base = OTHER; note = 5'-methyluridine-3'-phosphate
  modified_base 21: mod_base = OTHER; note = 5'-methyluridine-3'-phosphate
caatggtcagatcttcaaaataa

SEQ ID NO: 527 - RNA, 21 nt, synthetic construct
  source 1..21: mol_type = other RNA
  modified_base 1: mod_base = OTHER; note = 2'-O-methylguanosine-3'-phosphorothioate
  modified_base 2: mod_base = OTHER; note = 2'-O-methylguanosine-3'-phosphorothioate
  modified_base 3: mod_base = OTHER; note = 2'-O-methyluridine-3'-phosphate
  modified_base 4: mod_base = OTHER; note = 2'-O-methylcytidine-3'-phosphate
  modified_base 5: mod_base = OTHER; note = 2'-O-methyladenosine-3'-phosphate
  modified_base 6: mod_base = OTHER; note = 2'-O-methylguanosine-3'-phosphate
  modified_base 7: mod_base = OTHER; note = 2'-deoxy-2'-fluoroadenosine-3'-phosphate
  modified_base 8: mod_base = OTHER; note = 2'-O-methyluridine-3'-phosphate
  modified_base 9: mod_base = OTHER; note = 2'-deoxy-2'-fluorocytidine-3'-phosphate
  modified_base 10: mod_base = OTHER; note = 2'-deoxy-2'-fluorouridine-3'-phosphate
  modified_base 11: mod_base = OTHER; note = 2'-deoxy-2'-fluorouridine-3'-phosphate
  modified_base 12: mod_base = OTHER; note = 2'-O-methylcytidine-3'-phosphate
  modified_base 13: mod_base = OTHER; note = 2'-O-methyladenosine-3'-phosphate
  modified_base 14: mod_base = OTHER; note = 2'-O-methyladenosine-3'-phosphate
  modified_base 15: mod_base = OTHER; note = 2'-O-methyladenosine-3'-phosphate
  modified_base 16: mod_base = OTHER; note = 2'-O-methyladenosine-3'-phosphate
  modified_base 17: mod_base = OTHER; note = 2'-O-methyluridine-3'-phosphate
  modified_base 18: mod_base = OTHER; note = 2'-O-methyladenosine-3'-phosphate
  modified_base 19: mod_base = OTHER; note = 2'-O-methyladenosine-3'-phosphate
  modified_base 20: mod_base = OTHER; note = 2'-O-methyladenosine-3'-phosphate
  modified_base 21: mod_base = OTHER; note = 2'-O-methyladenosine-3'-phosphate ((2S,4R)-1-[29-[[2-(acetylamino)-2-deoxy-beta-D-galactopyra nosyl]oxy]-14,14-bis[[3-[[3-[[5-[[2-(acetylamino)-2-deoxy-b eta-D-galactopyranosyl]oxy]-1-oxopentyl]amino]propyl]amino] -3-oxopropoxy]methyl]-1,12,19,25-tetraoxo-16-oxa-13,20,24-t riazanonacos-1-yl]-4-hydroxy-2-pyrrolidinyl)methyl ester
ggtcagatcttcaaaataaaa

SEQ ID NO: 528 - RNA, 23 nt, synthetic construct
  source 1..23: mol_type = other RNA
  modified_base 1: mod_base = OTHER; note = 2'-O-methyluridine-3'-phosphorothioate
  modified_base 2: mod_base = OTHER; note = 2'-deoxy-2'-fluorouridine-3'-phosphorothioate
  modified_base 3: mod_base = OTHER; note = 2'-O-methyluridine-3'-phosphate
  modified_base 4: mod_base = OTHER; note = 2'-O-methyluridine-3'-phosphate
  modified_base 5: mod_base = OTHER; note = 2'-O-methyladenosine-3'-phosphate
  modified_base 6: mod_base = OTHER; note = 2'-deoxy-2'-fluorouridine-3'-phosphate
  modified_base 7: mod_base = OTHER; note = 2'-O-methyluridine-3'-phosphate
  modified_base 8: mod_base = OTHER; note = 2'-deoxy-2'-fluorouridine-3'-phosphate
  modified_base 9: mod_base = OTHER; note = 2'-deoxy-2'-fluorouridine-3'-phosphate
  modified_base 10: mod_base = OTHER; note = 2'-O-methylguanosine-3'-phosphate
  modified_base 11: mod_base = OTHER; note = 2'-O-methyladenosine-3'-phosphate
  modified_base 12: mod_base = OTHER; note = 2'-O-methyladenosine-3'-phosphate
  modified_base 13: mod_base = OTHER; note = 2'-O-methylguanosine-3'-phosphate
  modified_base 14: mod_base = OTHER; note = 2'-deoxy-2'-fluoroadenosine-3'-phosphate
  modified_base 15: mod_base = OTHER; note = 2'-O-methyluridine-3'-phosphate
  modified_base 16: mod_base = OTHER; note = 2'-deoxy-2'-fluorocytidine-3'-phosphate
  modified_base 17: mod_base = OTHER; note = 2'-O-methyluridine-3'-phosphate
  modified_base 18: mod_base = OTHER; note = 2'-O-methylguanosine-3'-phosphate
  modified_base 19: mod_base = OTHER; note = 2'-O-methyladenosine-3'-phosphate
  modified_base 20: mod_base = OTHER; note = 2'-O-methylcytidine-3'-phosphate
  modified_base 21: mod_base = OTHER; note = 2'-O-methylcytidine-3'-phosphorothioate
  modified_base 22: mod_base = OTHER; note = 2'-O-methyladenosine-3'-phosphorothioate
  modified_base 23: mod_base = OTHER; note = 2'-O-methyluridine
ttttattttgaagatctgaccat

SEQ ID NO: 529 - RNA, 23 nt, synthetic construct
  source 1..23: mol_type = other RNA
  modified_base 2: mod_base = OTHER; note = 5'-methyluridine-3'-phosphate
  modified_base 5: mod_base = OTHER; note = 5'-methyluridine-3'-phosphate
  modified_base 10: mod_base = OTHER; note = 5'-methyluridine-3'-phosphate
  modified_base 12: mod_base = OTHER; note = 5'-methyluridine-3'-phosphate
  modified_base 13: mod_base = OTHER; note = 5'-methyluridine-3'-phosphate
  modified_base 19: mod_base = OTHER; note = 5'-methyluridine-3'-phosphate
atggtcagatcttcaaaataaaa

SEQ ID NO: 530 - RNA, 21 nt, synthetic construct
  source 1..21: mol_type = other RNA
  modified_base 1: mod_base = OTHER; note = 2'-O-methyluridine-3'-phosphorothioate
  modified_base 2: mod_base = OTHER; note = 2'-O-methyluridine-3'-phosphorothioate
  modified_base 3: mod_base = OTHER; note = 2'-deoxy-2'-fluoroguanosine-3'-phosphate
  modified_base 4: mod_base = OTHER; note = 2'-O-methyluridine-3'-phosphate
  modified_base 5: mod_base = OTHER; note = 2'-deoxy-2'-fluoroguanosine-3'-phosphate
  modified_base 6: mod_base = OTHER; note = 2'-O-methyluridine-3'-phosphate
  modified_base 7: mod_base = OTHER; note = 2'-deoxy-2'-fluorocytidine-3'-phosphate
  modified_base 8: mod_base = OTHER; note = 2'-O-methyladenosine-3'-phosphate
  modified_base 9: mod_base = OTHER; note = 2'-deoxy-2'-fluoroadenosine-3'-phosphate
  modified_base 10: mod_base = OTHER; note = 2'-deoxy-2'-fluoroadenosine-3'-phosphate
  modified_base 11: mod_base = OTHER; note = 2'-deoxy-2'-fluoroadenosine-3'-phosphate
  modified_base 12: mod_base = OTHER; note = 2'-O-methyluridine-3'-phosphate
  modified_base 13: mod_base = OTHER; note = 2'-deoxy-2'-fluoroguanosine-3'-phosphate
  modified_base 14: mod_base = OTHER; note = 2'-O-methyluridine-3'-phosphate
  modified_base 15: mod_base = OTHER; note = 2'-deoxy-2'-fluorouridine-3'-phosphate
  modified_base 16: mod_base = OTHER; note = 2'-O-methylcytidine-3'-phosphate
  modified_base 17: mod_base = OTHER; note = 2'-deoxy-2'-fluorouridine-3'-phosphate
  modified_base 18: mod_base = OTHER; note = 2'-O-methyladenosine-3'-phosphate
  modified_base 19: mod_base = OTHER; note = 2'-deoxy-2'-fluorocytidine-3'-phosphate
  modified_base 20: mod_base = OTHER; note = 2'-O-methyladenosine-3'-phosphate
  modified_base 21: mod_base = OTHER; note = 2'-O-methyluridine-3'-phosphate ((2S,4R)-1-[29-[[2-(acetylamino)-2-deoxy-beta-D-galactopyra nosyl]oxy]-14,14-bis[[3-[[3-[[5-[[2-(acetylamino)-2-deoxy-b eta-D-galactopyranosyl]oxy]-1-oxopentyl]amino]propyl]amino] -3-oxopropoxy]methyl]-1,12,19,25-tetraoxo-16-oxa-13,20,24-t riazanonacos-1-yl]-4-hydroxy-2-pyrrolidinyl)methyl ester
ttgtgtcaaaatgttctacat

SEQ ID NO: 531 - RNA, 23 nt, synthetic construct
  source 1..23: mol_type = other RNA
  modified_base 1: mod_base = OTHER; note = 2'-O-methyladenosine-3'-phosphorothioate
  modified_base 2: mod_base = OTHER; note = 2'-deoxy-2'-fluorouridine-3'-phosphorothioate
  modified_base 3: mod_base = OTHER; note = 2'-O-methylguanosine-3'-phosphate
  modified_base 4: mod_base = OTHER; note = 2'-O-methyluridine-3'-phosphate
  modified_base 5: mod_base = OTHER; note = 2'-O-methyladenosine-3'-phosphate
  modified_base 6: mod_base = OTHER; note = 2'-deoxy-2'-fluoroguanosine-3'-phosphate
  modified_base 7: mod_base = OTHER; note = 2'-O-methyladenosine-3'-phosphate
  modified_base 8: mod_base = OTHER; note = 2'-deoxy-2'-fluoroadenosine-3'-phosphate
  modified_base 9: mod_base = OTHER; note = 2'-deoxy-2'-fluorocytidine-3'-phosphate
  modified_base 10: mod_base = OTHER; note = 2'-O-methyladenosine-3'-phosphate
  modified_base 11: mod_base = OTHER; note = 2'-O-methyluridine-3'-phosphate
  modified_base 12: mod_base = OTHER; note = 2'-O-methyluridine-3'-phosphate
  modified_base 13: mod_base = OTHER; note = 2'-O-methyluridine-3'-phosphate
  modified_base 14: mod_base = OTHER; note = 2'-deoxy-2'-fluorouridine-3'-phosphate
  modified_base 15: mod_base = OTHER; note = 2'-O-methylguanosine-3'-phosphate
  modified_base 16: mod_base = OTHER; note = 2'-deoxy-2'-fluoroadenosine-3'-phosphate
  modified_base 17: mod_base = OTHER; note = 2'-O-methylcytidine-3'-phosphate
  modified_base 18: mod_base = OTHER; note = 2'-O-methyladenosine-3'-phosphate
  modified_base 19: mod_base = OTHER; note = 2'-O-methylcytidine-3'-phosphate
  modified_base 20: mod_base = OTHER; note = 2'-O-methyladenosine-3'-phosphate
  modified_base 21: mod_base = OTHER; note = 2'-O-methyladenosine-3'-phosphorothioate
  modified_base 22: mod_base = OTHER; note = 2'-O-methyladenosine-3'-phosphorothioate
  modified_base 23: mod_base = OTHER; note = 2'-O-methyladenosine
atgtagaacattttgacacaaaa

SEQ ID NO: 532 - RNA, 23 nt, synthetic construct
  source 1..23: mol_type = other RNA
  modified_base 1: mod_base = OTHER; note = 5'-methyluridine-3'-phosphate
  modified_base 2: mod_base = OTHER; note = 5'-methyluridine-3'-phosphate
  modified_base 3: mod_base = OTHER; note = 5'-methyluridine-3'-phosphate
  modified_base 4: mod_base = OTHER; note = 5'-methyluridine-3'-phosphate
  modified_base 6: mod_base = OTHER; note = 5'-methyluridine-3'-phosphate
  modified_base 8: mod_base = OTHER; note = 5'-methyluridine-3'-phosphate
  modified_base 14: mod_base = OTHER; note = 5'-methyluridine-3'-phosphate
  modified_base 16: mod_base = OTHER; note = 5'-methyluridine-3'-phosphate
  modified_base 17: mod_base = OTHER; note = 5'-methyluridine-3'-phosphate
  modified_base 19: mod_base = OTHER; note = 5'-methyluridine-3'-phosphate
  modified_base 23: mod_base = OTHER; note = 5'-methyluridine
ttttgtgtcaaaatgttctacat

SEQ ID NO: 533 - RNA, 21 nt, synthetic construct
  source 1..21: mol_type = other RNA
  modified_base 1: mod_base = OTHER; note = 2'-O-methyladenosine-3'-phosphorothioate
  modified_base 2: mod_base = OTHER; note = 2'-O-methyluridine-3'-phosphorothioate
  modified_base 3: mod_base = OTHER; note = 2'-deoxy-2'-fluoroguanosine-3'-phosphate
  modified_base 4: mod_base = OTHER; note = 2'-O-methylguanosine-3'-phosphate
  modified_base 5: mod_base = OTHER; note = 2'-deoxy-2'-fluorouridine-3'-phosphate
  modified_base 6: mod_base = OTHER; note = 2'-O-methylcytidine-3'-phosphate
  modified_base 7: mod_base = OTHER; note = 2'-deoxy-2'-fluoroadenosine-3'-phosphate
  modified_base 8: mod_base = OTHER; note = 2'-O-methylguanosine-3'-phosphate
  modified_base 9: mod_base = OTHER; note = 2'-deoxy-2'-fluoroadenosine-3'-phosphate
  modified_base 10: mod_base = OTHER; note = 2'-deoxy-2'-fluorouridine-3'-phosphate
  modified_base 11: mod_base = OTHER; note = 2'-deoxy-2'-fluorocytidine-3'-phosphate
  modified_base 12: mod_base = OTHER; note = 2'-O-methyluridine-3'-phosphate
  modified_base 13: mod_base = OTHER; note = 2'-deoxy-2'-fluorouridine-3'-phosphate
  modified_base 14: mod_base = OTHER; note = 2'-O-methylcytidine-3'-phosphate
  modified_base 15: mod_base = OTHER; note = 2'-deoxy-2'-fluoroadenosine-3'-phosphate
  modified_base 16: mod_base = OTHER; note = 2'-O-methyladenosine-3'-phosphate
  modified_base 17: mod_base = OTHER; note = 2'-deoxy-2'-fluoroadenosine-3'-phosphate
  modified_base 18: mod_base = OTHER; note = 2'-O-methyladenosine-3'-phosphate
  modified_base 19: mod_base = OTHER; note = 2'-deoxy-2'-fluorouridine-3'-phosphate
  modified_base 20: mod_base = OTHER; note = 2'-O-methyladenosine-3'-phosphate
  modified_base 21: mod_base = OTHER; note = 2'-O-methyladenosine-3'-phosphate ((2S,4R)-1-[29-[[2-(acetylamino)-2-deoxy-beta-D-galactopyra nosyl]oxy]-14,14-bis[[3-[[3-[[5-[[2-(acetylamino)-2-deoxy-b eta-D-galactopyranosyl]oxy]-1-oxopentyl]amino]propyl]amino] -3-oxopropoxy]methyl]-1,12,19,25-tetraoxo-16-oxa-13,20,24-t riazanonacos-1-yl]-4-hydroxy-2-pyrrolidinyl)methyl ester
atggtcagatcttcaaaataa

SEQ ID NO: 534 - RNA, 23 nt, synthetic construct
  source 1..23: mol_type = other RNA
  modified_base 1: mod_base = OTHER; note = 2'-O-methyluridine-3'-phosphorothioate
  modified_base 2: mod_base = OTHER; note = 2'-deoxy-2'-fluorouridine-3'-phosphorothioate
  modified_base 3: mod_base = OTHER; note = 2'-O-methyladenosine-3'-phosphate
  modified_base 4: mod_base = OTHER; note = 2'-deoxy-2'-fluorouridine-3'-phosphate
  modified_base 5: mod_base = OTHER; note = 2'-O-methyluridine-3'-phosphate
  modified_base 6: mod_base = OTHER; note = 2'-deoxy-2'-fluorouridine-3'-phosphate
  modified_base 7: mod_base = OTHER; note = 2'-O-methyluridine-3'-phosphate
  modified_base 8: mod_base = OTHER; note = 2'-deoxy-2'-fluoroguanosine-3'-phosphate
  modified_base 9: mod_base = OTHER; note = 2'-O-methyladenosine-3'-phosphate
  modified_base 10: mod_base = OTHER; note = 2'-deoxy-2'-fluoroadenosine-3'-phosphate
  modified_base 11: mod_base = OTHER; note = 2'-O-methylguanosine-3'-phosphate
  modified_base 12: mod_base = OTHER; note = 2'-O-methyladenosine-3'-phosphate
  modified_base 13: mod_base = OTHER; note = 2'-O-methyluridine-3'-phosphate
  modified_base 14: mod_base = OTHER; note = 2'-deoxy-2'-fluorocytidine-3'-phosphate
  modified_base 15: mod_base = OTHER; note = 2'-O-methyluridine-3'-phosphate
  modified_base 16: mod_base = OTHER; note = 2'-deoxy-2'-fluoroguanosine-3'-phosphate
  modified_base 17: mod_base = OTHER; note = 2'-O-methyladenosine-3'-phosphate
  modified_base 18: mod_base = OTHER; note = 2'-deoxy-2'-fluorocytidine-3'-phosphate
  modified_base 19: mod_base = OTHER; note = 2'-O-methylcytidine-3'-phosphate
  modified_base 20: mod_base = OTHER; note = 2'-deoxy-2'-fluoroadenosine-3'-phosphate
  modified_base 21: mod_base = OTHER; note = 2'-O-methyluridine-3'-phosphorothioate
  modified_base 22: mod_base = OTHER; note = 2'-O-methyluridine-3'-phosphorothioate
  modified_base 23: mod_base = OTHER; note = 2'-O-methylguanosine
ttattttgaagatctgaccattg

SEQ ID NO: 535 - RNA, 23 nt, synthetic construct
  source 1..23: mol_type = other RNA
  modified_base 4: mod_base = OTHER; note = 5'-methyluridine-3'-phosphate
  modified_base 7: mod_base = OTHER; note = 5'-methyluridine-3'-phosphate
  modified_base 12: mod_base = OTHER; note = 5'-methyluridine-3'-phosphate
  modified_base 14: mod_base = OTHER; note = 5'-methyluridine-3'-phosphate
  modified_base 15: mod_base = OTHER; note = 5'-methyluridine-3'-phosphate
  modified_base 21: mod_base = OTHER; note = 5'-methyluridine-3'-phosphate
caatggtcagatcttcaaaataa

SEQ ID NO: 536 - RNA, 21 nt, synthetic construct
  source 1..21: mol_type = other RNA
  modified_base 1: mod_base = OTHER; note = 2'-O-methyladenosine-3'-phosphorothioate
  modified_base 2: mod_base = OTHER; note = 2'-O-methyluridine-3'-phosphorothioate
  modified_base 3: mod_base = OTHER; note = 2'-O-methylguanosine-3'-phosphate
  modified_base 4: mod_base = OTHER; note = 2'-O-methylguanosine-3'-phosphate
  modified_base 5: mod_base = OTHER; note = 2'-O-methyluridine-3'-phosphate
  modified_base 6: mod_base = OTHER; note = 2'-deoxy-2'-fluorocytidine-3'-phosphate
  modified_base 7: mod_base = OTHER; note = 2'-deoxy-2'-fluoroadenosine-3'-phosphate
  modified_base 8: mod_base = OTHER; note = 2'-O-methylguanosine-3'-phosphate
  modified_base 9: mod_base = OTHER; note = 2'-deoxy-2'-fluoroadenosine-3'-phosphate
  modified_base 10: mod_base = OTHER; note = 2'-O-methyluridine-3'-phosphate
  modified_base 11: mod_base = OTHER; note = 2'-deoxy-2'-fluorocytidine-3'-phosphate
  modified_base 12: mod_base = OTHER; note = 2'-deoxy-2'-fluorouridine-3'-phosphate
  modified_base 13: mod_base = OTHER; note = 2'-O-methyluridine-3'-phosphate
  modified_base 14: mod_base = OTHER; note = 2'-O-methylcytidine-3'-phosphate
  modified_base 15: mod_base = OTHER; note = 2'-O-methyladenosine-3'-phosphate
  modified_base 16: mod_base = OTHER; note = 2'-O-methyladenosine-3'-phosphate
  modified_base 17: mod_base = OTHER; note = 2'-O-methyladenosine-3'-phosphate
  modified_base 18: mod_base = OTHER; note = 2'-O-methyladenosine-3'-phosphate
  modified_base 19: mod_base = OTHER; note = 2'-deoxy-2'-fluorouridine-3'-phosphate
  modified_base 20: mod_base = OTHER; note = 2'-O-methyladenosine-3'-phosphate
  modified_base 21: mod_base = OTHER; note = 2'-deoxy-2'-fluoroadenosine-3'-phosphate ((2S,4R)-1-[29-[[2-(acetylamino)-2-deoxy-beta-D-galactopyra nosyl]oxy]-14,14-bis[[3-[[3-[[5-[[2-(acetylamino)-2-deoxy-b eta-D-galactopyranosyl]oxy]-1-oxopentyl]amino]propyl]amino] -3-oxopropoxy]methyl]-1,12,19,25-tetraoxo-16-oxa-13,20,24-t riazanonacos-1-yl]-4-hydroxy-2-pyrrolidinyl)methyl ester
atggtcagatcttcaaaataa

SEQ ID NO: 537 - RNA, 23 nt, synthetic construct
  source 1..23: mol_type = other RNA
  modified_base 1: mod_base = OTHER; note = 2'-O-methyluridine-3'-phosphorothioate
  modified_base 2: mod_base = OTHER; note = 2'-deoxy-2'-fluorouridine-3'-phosphorothioate
  modified_base 3: mod_base = OTHER; note = 2'-O-methyladenosine-3'-phosphate
  modified_base 4: mod_base = OTHER; note = 2'-O-methyluridine-3'-phosphate
  modified_base 5: mod_base = OTHER; note = 2'-deoxy-2'-fluorouridine-3'-phosphate
  modified_base 6: mod_base = OTHER; note = 2'-deoxy-2'-fluorouridine-3'-phosphate
  modified_base 7: mod_base = OTHER; note = 2'-O-methyluridine-3'-phosphate
  modified_base 8: mod_base = OTHER; note = 2'-deoxy-2'-fluoroguanosine-3'-phosphate
  modified_base 9: mod_base = OTHER; note = 2'-O-methyladenosine-3'-phosphate
  modified_base 10: mod_base = OTHER; note = 2'-O-methyladenosine-3'-phosphate
  modified_base 11: mod_base = OTHER; note = 2'-O-methylguanosine-3'-phosphate
  modified_base 12: mod_base = OTHER; note = 2'-deoxy-2'-fluoroadenosine-3'-phosphate
  modified_base 13: mod_base = OTHER; note = 2'-O-methyluridine-3'-phosphate
  modified_base 14: mod_base = OTHER; note = 2'-deoxy-2'-fluorocytidine-3'-phosphate
  modified_base 15: mod_base = OTHER; note = 2'-O-methyluridine-3'-phosphate
  modified_base 16: mod_base = OTHER; note = 2'-deoxy-2'-fluoroguanosine-3'-phosphate
  modified_base 17: mod_base = OTHER; note = 2'-O-methyladenosine-3'-phosphate
  modified_base 18: mod_base = OTHER; note = 2'-O-methylcytidine-3'-phosphate
  modified_base 19: mod_base = OTHER; note = 2'-O-methylcytidine-3'-phosphate
  modified_base 20: mod_base = OTHER; note = 2'-O-methyladenosine-3'-phosphate
  modified_base 21: mod_base = OTHER; note = 2'-deoxy-2'-fluorouridine-3'-phosphorothioate
  modified_base 22: mod_base = OTHER; note = 2'-O-methyluridine-3'-phosphorothioate
  modified_base 23: mod_base = OTHER; note = 2'-O-methylguanosine
ttattttgaagatctgaccattg

SEQ ID NO: 538 - RNA, 23 nt, synthetic construct
  source 1..23: mol_type = other RNA
  modified_base 4: mod_base = OTHER; note = 5'-methyluridine-3'-phosphate
  modified_base 7: mod_base = OTHER; note = 5'-methyluridine-3'-phosphate
  modified_base 12: mod_base = OTHER; note = 5'-methyluridine-3'-phosphate
  modified_base 14: mod_base = OTHER; note = 5'-methyluridine-3'-phosphate
  modified_base 15: mod_base = OTHER; note = 5'-methyluridine-3'-phosphate
  modified_base 21: mod_base = OTHER; note = 5'-methyluridine-3'-phosphate
caatggtcagatcttcaaaataa

SEQ ID NO: 539 - RNA, 21 nt, synthetic construct
  source 1..21: mol_type = other RNA
  modified_base 1: mod_base = OTHER; note = 2'-O-methyluridine-3'-phosphorothioate
  modified_base 2: mod_base = OTHER; note = 2'-O-methyluridine-3'-phosphorothioate
  modified_base 3: mod_base = OTHER; note = 2'-O-methylguanosine-3'-phosphate
  modified_base 4: mod_base = OTHER; note = 2'-O-methyluridine-3'-phosphate
  modified_base 5: mod_base = OTHER; note = 2'-O-methylguanosine-3'-phosphate
  modified_base 6: mod_base = OTHER; note = 2'-O-hexadecyl-uridine-3'-phosphate
  modified_base 7: mod_base = OTHER; note = 2'-deoxy-2'-fluorocytidine-3'-phosphate
  modified_base 8: mod_base = OTHER; note = 2'-O-methyladenosine-3'-phosphate
  modified_base 9: mod_base = OTHER; note = 2'-deoxy-2'-fluoroadenosine-3'-phosphate
  modified_base 10: mod_base = OTHER; note = 2'-deoxy-2'-fluoroadenosine-3'-phosphate
  modified_base 11: mod_base = OTHER; note = 2'-deoxy-2'-fluoroadenosine-3'-phosphate
  modified_base 12: mod_base = OTHER; note = 2'-O-methyluridine-3'-phosphate
  modified_base 13: mod_base = OTHER; note = 2'-O-methylguanosine-3'-phosphate
  modified_base 14: mod_base = OTHER; note = 2'-O-methyluridine-3'-phosphate
  modified_base 15: mod_base = OTHER; note = 2'-O-methyluridine-3'-phosphate
  modified_base 16: mod_base = OTHER; note = 2'-O-methylcytidine-3'-phosphate
  modified_base 17: mod_base = OTHER; note = 2'-O-methyluridine-3'-phosphate
  modified_base 18: mod_base = OTHER; note = 2'-O-methyladenosine-3'-phosphate
  modified_base 19: mod_base = OTHER; note = 2'-O-methylcytidine-3'-phosphate
  modified_base 20: mod_base = OTHER; note = 2'-O-methyladenosine-3'-phosphate
  modified_base 21: mod_base = OTHER; note = 2'-O-methyluridine-3'-phosphate ((2S,4R)-1-[29-[[2-(acetylamino)-2-deoxy-beta-D-galactopyra nosyl]oxy]-14,14-bis[[3-[[3-[[5-[[2-(acetylamino)-2-deoxy-b eta-D-galactopyranosyl]oxy]-1-oxopentyl]amino]propyl]amino] -3-oxopropoxy]methyl]-1,12,19,25-tetraoxo-16-oxa-13,20,24-t riazanonacos-1-yl]-4-hydroxy-2-pyrrolidinyl)methyl ester
ttgtgtcaaaatgttctacat

SEQ ID NO: 540 - RNA, 23 nt, synthetic construct
  source 1..23: mol_type = other RNA
  modified_base 1: mod_base = OTHER; note = 2'-O-methyladenosine-3'-phosphorothioate
  modified_base 2: mod_base = OTHER; note = 2'-deoxy-2'-fluorouridine-3'-phosphorothioate
  modified_base 3: mod_base = OTHER; note = 2'-O-methylguanosine-3'-phosphate
  modified_base 4: mod_base = OTHER; note = 2'-O-methyluridine-3'-phosphate
  modified_base 5: mod_base = OTHER; note = 2'-O-methyladenosine-3'-phosphate
  modified_base 6: mod_base = OTHER; note = 2'-deoxy-2'-fluoroguanosine-3'-phosphate
  modified_base 7: mod_base = OTHER; note = 2'-O-methyladenosine-3'-phosphate
  modified_base 8: mod_base = OTHER; note = 2'-deoxy-2'-fluoroadenosine-3'-phosphate
  modified_base 9: mod_base = OTHER; note = 2'-deoxy-2'-fluorocytidine-3'-phosphate
  modified_base 10: mod_base = OTHER; note = 2'-O-methyladenosine-3'-phosphate
  modified_base 11: mod_base = OTHER; note = 2'-O-methyluridine-3'-phosphate
  modified_base 12: mod_base = OTHER; note = 2'-O-methyluridine-3'-phosphate
  modified_base 13: mod_base = OTHER; note = 2'-O-methyluridine-3'-phosphate
  modified_base 14: mod_base = OTHER; note = 2'-deoxy-2'-fluorouridine-3'-phosphate
  modified_base 15: mod_base = OTHER; note = 2'-O-methylguanosine-3'-phosphate
  modified_base 16: mod_base = OTHER; note = 2'-deoxy-2'-fluoroadenosine-3'-phosphate
  modified_base 17: mod_base = OTHER; note = 2'-O-methylcytidine-3'-phosphate
  modified_base 18: mod_base = OTHER; note = 2'-O-methyladenosine-3'-phosphate
  modified_base 19: mod_base = OTHER; note = 2'-O-methylcytidine-3'-phosphate
  modified_base 20: mod_base = OTHER; note = 2'-O-methyladenosine-3'-phosphate
  modified_base 21: mod_base = OTHER; note = 2'-O-methyladenosine-3'-phosphorothioate
  modified_base 22: mod_base = OTHER; note = 2'-O-methyladenosine-3'-phosphorothioate
  modified_base 23: mod_base = OTHER; note = 2'-O-methyladenosine
atgtagaacattttgacacaaaa

SEQ ID NO: 541 - RNA, 23 nt, synthetic construct
  source 1..23: mol_type = other RNA
  modified_base 1: mod_base = OTHER; note = 5'-methyluridine-3'-phosphate
  modified_base 2: mod_base = OTHER; note = 5'-methyluridine-3'-phosphate
  modified_base 3: mod_base = OTHER; note = 5'-methyluridine-3'-phosphate
  modified_base 4: mod_base = OTHER; note = 5'-methyluridine-3'-phosphate
  modified_base 6: mod_base = OTHER; note = 5'-methyluridine-3'-phosphate
  modified_base 8: mod_base = OTHER; note = 5'-methyluridine-3'-phosphate
  modified_base 14: mod_base = OTHER; note = 5'-methyluridine-3'-phosphate
  modified_base 16: mod_base = OTHER; note = 5'-methyluridine-3'-phosphate
  modified_base 17: mod_base = OTHER; note = 5'-methyluridine-3'-phosphate
  modified_base 19: mod_base = OTHER; note = 5'-methyluridine-3'-phosphate
  modified_base 23: mod_base = OTHER; note = 5'-methyluridine
ttttgtgtcaaaatgttctacat

SEQ ID NO: 542 - RNA, 21 nt, synthetic construct
  source 1..21: mol_type = other RNA
  modified_base 1: mod_base = OTHER; note = 2'-O-methyluridine-3'-phosphorothioate
  modified_base 2: mod_base = OTHER; note = 2'-O-methyluridine-3'-phosphorothioate
  modified_base 3: mod_base = OTHER; note = 2'-O-methylguanosine-3'-phosphate
  modified_base 4: mod_base = OTHER; note = 2'-O-methyluridine-3'-phosphate
  modified_base 5: mod_base = OTHER; note = 2'-deoxy-2'-fluoroguanosine-3'-phosphate
  modified_base 6: mod_base = OTHER; note = 2'-O-methyluridine-3'-phosphate
  modified_base 7: mod_base = OTHER; note = 2'-deoxy-2'-fluorocytidine-3'-phosphate
  modified_base 8: mod_base = OTHER; note = 2'-O-methyladenosine-3'-phosphate
  modified_base 9: mod_base = OTHER; note = 2'-deoxy-2'-fluoroadenosine-3'-phosphate
  modified_base 10: mod_base = OTHER; note = 2'-O-methyladenosine-3'-phosphate
  modified_base 11: mod_base = OTHER; note = 2'-deoxy-2'-fluoroadenosine-3'-phosphate
  modified_base 12: mod_base = OTHER; note = 2'-deoxy-2'-fluorouridine-3'-phosphate
  modified_base 13: mod_base = OTHER; note = 2'-O-methylguanosine-3'-phosphate
  modified_base 14: mod_base = OTHER; note = 2'-O-methyluridine-3'-phosphate
  modified_base 15: mod_base = OTHER; note = 2'-O-methyluridine-3'-phosphate
  modified_base 16: mod_base = OTHER; note = 2'-O-methylcytidine-3'-phosphate
  modified_base 17: mod_base = OTHER; note = 2'-O-methyluridine-3'-phosphate
  modified_base 18: mod_base = OTHER; note = 2'-O-methyladenosine-3'-phosphate
  modified_base 19: mod_base = OTHER; note = 2'-deoxy-2'-fluorocytidine-3'-phosphate
  modified_base 20: mod_base = OTHER; note = 2'-O-methyladenosine-3'-phosphate
  modified_base 21: mod_base = OTHER; note 2-hydroxymethyl-4-methoxy-tetrahydrofuran-3-phosphate ((2S,4R)-1-[29-[[2-(acetylamino)-2-deoxy-beta-D-galactopyra nosyl]oxy]-14,14-bis[[3-[[3-[[5-[[2-(acetylamino)-2-deoxy-b eta-D-galactopyranosyl]oxy]-1-oxopentyl]amino]propyl]amino] -3-oxopropoxy]methyl]-1,12,19,25-tetraoxo-16-oxa-13,20,24-t riazanonacos-1-yl]-4-hydroxy-2-pyrrolidinyl)methyl ester
ttgtgtcaaaatgttctacan

SEQ ID NO: 543 - RNA, 23 nt, synthetic construct
  source 1..23: mol_type = other RNA
  modified_base 1: mod_base = OTHER; note = 2'-O-methyladenosine-3'-phosphorothioate
  modified_base 2: mod_base = OTHER; note = 2'-deoxy-2'-fluorouridine-3'-phosphorothioate
  modified_base 3: mod_base = OTHER; note = 2'-O-methylguanosine-3'-phosphate
  modified_base 4: mod_base = OTHER; note = 2'-O-methyluridine-3'-phosphate
  modified_base 5: mod_base = OTHER; note = 2'-deoxy-2'-fluoroadenosine-3'-phosphate
  modified_base 6: mod_base = OTHER; note = 2'-deoxy-2'-fluoroguanosine-3'-phosphate
  modified_base 7: mod_base = OTHER; note = 2'-O-methyladenosine-3'-phosphate
  modified_base 8: mod_base = OTHER; note = 2'-deoxy-2'-fluoroadenosine-3'-phosphate
  modified_base 9: mod_base = OTHER; note = 2'-O-methylcytidine-3'-phosphate
  modified_base 10: mod_base = OTHER; note = 2'-O-methyladenosine-3'-phosphate
  modified_base 11: mod_base = OTHER; note = 2'-O-methyluridine-3'-phosphate
  modified_base 12: mod_base = OTHER; note = 2'-deoxy-2'-fluorouridine-3'-phosphate
  modified_base 13: mod_base = OTHER; note = 2'-O-methyluridine-3'-phosphate
  modified_base 14: mod_base = OTHER; note = 2'-deoxy-2'-fluorouridine-3'-phosphate
  modified_base 15: mod_base = OTHER; note = 2'-O-methylguanosine-3'-phosphate
  modified_base 16: mod_base = OTHER; note = 2'-deoxy-2'-fluoroadenosine-3'-phosphate
  modified_base 17: mod_base = OTHER; note = 2'-O-methylcytidine-3'-phosphate
  modified_base 18: mod_base = OTHER; note = 2'-O-methyladenosine-3'-phosphate
  modified_base 19: mod_base = OTHER; note = 2'-O-methylcytidine-3'-phosphate
  modified_base 20: mod_base = OTHER; note = 2'-O-methyladenosine-3'-phosphate
  modified_base 21: mod_base = OTHER; note = 2'-O-methyladenosine-3'-phosphorothioate
  modified_base 22: mod_base = OTHER; note = 2'-O-methyladenosine-3'-phosphorothioate
  modified_base 23: mod_base = OTHER; note = 2'-O-methyladenosine
atgtagaacattttgacacaaaa

SEQ ID NO: 544 - RNA, 23 nt, synthetic construct
  source 1..23: mol_type = other RNA
  modified_base 1: mod_base = OTHER; note = 5'-methyluridine-3'-phosphate
  modified_base 2: mod_base = OTHER; note = 5'-methyluridine-3'-phosphate
  modified_base 3: mod_base = OTHER; note = 5'-methyluridine-3'-phosphate
  modified_base 4: mod_base = OTHER; note = 5'-methyluridine-3'-phosphate
  modified_base 6: mod_base = OTHER; note = 5'-methyluridine-3'-phosphate
  modified_base 8: mod_base = OTHER; note = 5'-methyluridine-3'-phosphate
  modified_base 14: mod_base = OTHER; note = 5'-methyluridine-3'-phosphate
  modified_base 16: mod_base = OTHER; note = 5'-methyluridine-3'-phosphate
  modified_base 17: mod_base = OTHER; note = 5'-methyluridine-3'-phosphate
  modified_base 19: mod_base = OTHER; note = 5'-methyluridine-3'-phosphate
  modified_base 23: mod_base = OTHER; note = 5'-methyluridine
ttttgtgtcaaaatgttctacat

SEQ ID NO: 545 - RNA, 21 nt, synthetic construct
  source 1..21: mol_type = other RNA
  modified_base 1: mod_base = OTHER; note = 2'-O-methyluridine-3'-phosphorothioate
  modified_base 2: mod_base = OTHER; note = 2'-O-methyluridine-3'-phosphorothioate
  modified_base 3: mod_base = OTHER; note = 2'-O-methylguanosine-3'-phosphate
  modified_base 4: mod_base = OTHER; note = 2'-O-methyluridine-3'-phosphate
  modified_base 5: mod_base = OTHER; note = 2'-deoxy-2'-fluoroguanosine-3'-phosphate
  modified_base 6: mod_base = OTHER; note = 2'-O-methyluridine-3'-phosphate
  modified_base 7: mod_base = OTHER; note = 2'-deoxy-2'-fluorocytidine-3'-phosphate
  modified_base 8: mod_base = OTHER; note = 2'-O-methyladenosine-3'-phosphate
  modified_base 9: mod_base = OTHER; note = 2'-deoxy-2'-fluoroadenosine-3'-phosphate
  modified_base 10: mod_base = OTHER; note = 2'-O-methyladenosine-3'-phosphate
  modified_base 11: mod_base = OTHER; note = 2'-deoxy-2'-fluoroadenosine-3'-phosphate
  modified_base 12: mod_base = OTHER; note = 2'-deoxy-2'-fluorouridine-3'-phosphate
  modified_base 13: mod_base = OTHER; note = 2'-O-methylguanosine-3'-phosphate
  modified_base 14: mod_base = OTHER; note = 2'-O-methyluridine-3'-phosphate
  modified_base 15: mod_base = OTHER; note = 2'-O-methyluridine-3'-phosphate
  modified_base 16: mod_base = OTHER; note = 2'-O-methylcytidine-3'-phosphate
  modified_base 17: mod_base = OTHER; note = 2'-O-methyluridine-3'-phosphate
  modified_base 18: mod_base = OTHER; note = 2'-O-methyladenosine-3'-phosphate
  modified_base 19: mod_base = OTHER; note = 2'-deoxy-2'-fluorocytidine-3'-phosphate
  modified_base 20: mod_base = OTHER; note = 2'-O-methyladenosine-3'-phosphate
  modified_base 21: mod_base = OTHER; note = 2'-deoxy-2'-fluorouridine-3'-phosphate ((2S,4R)-1-[29-[[2-(acetylamino)-2-deoxy-beta-D-galactopyra nosyl]oxy]-14,14-bis[[3-[[3-[[5-[[2-(acetylamino)-2-deoxy-b eta-D-galactopyranosyl]oxy]-1-oxopentyl]amino]propyl]amino] -3-oxopropoxy]methyl]-1,12,19,25-tetraoxo-16-oxa-13,20,24-t riazanonacos-1-yl]-4-hydroxy-2-pyrrolidinyl)methyl ester
ttgtgtcaaaatgttctacat

SEQ ID NO: 546 - RNA, 23 nt, synthetic construct
  source 1..23: mol_type = other RNA
  modified_base 1: mod_base = OTHER; note = 2'-O-methyladenosine-3'-phosphorothioate
  modified_base 2: mod_base = OTHER; note = 2'-deoxy-2'-fluorouridine-3'-phosphorothioate
  modified_base 3: mod_base = OTHER; note = 2'-O-methylguanosine-3'-phosphate
  modified_base 4: mod_base = OTHER; note = 2'-O-methyluridine-3'-phosphate
  modified_base 5: mod_base = OTHER; note = 2'-deoxy-2'-fluoroadenosine-3'-phosphate
  modified_base 6: mod_base = OTHER; note = 2'-deoxy-2'-fluoroguanosine-3'-phosphate
  modified_base 7: mod_base = OTHER; note = 2'-O-methyladenosine-3'-phosphate
  modified_base 8: mod_base = OTHER; note = 2'-deoxy-2'-fluoroadenosine-3'-phosphate
  modified_base 9: mod_base = OTHER; note = 2'-O-methylcytidine-3'-phosphate
  modified_base 10: mod_base = OTHER; note = 2'-O-methyladenosine-3'-phosphate
  modified_base 11: mod_base = OTHER; note = 2'-O-methyluridine-3'-phosphate
  modified_base 12: mod_base = OTHER; note = 2'-deoxy-2'-fluorouridine-3'-phosphate
  modified_base 13: mod_base = OTHER; note = 2'-O-methyluridine-3'-phosphate
  modified_base 14: mod_base = OTHER; note = 2'-deoxy-2'-fluorouridine-3'-phosphate
  modified_base 15: mod_base = OTHER; note = 2'-O-methylguanosine-3'-phosphate
  modified_base 16: mod_base = OTHER; note = 2'-deoxy-2'-fluoroadenosine-3'-phosphate
  modified_base 17: mod_base = OTHER; note = 2'-O-methylcytidine-3'-phosphate
  modified_base 18: mod_base = OTHER; note = 2'-O-methyladenosine-3'-phosphate
  modified_base 19: mod_base = OTHER; note = 2'-O-methylcytidine-3'-phosphate
  modified_base 20: mod_base = OTHER; note = 2'-O-methyladenosine-3'-phosphate
  modified_base 21: mod_base = OTHER; note = 2'-O-methyladenosine-3'-phosphorothioate
  modified_base 22: mod_base = OTHER; note = 2'-O-methyladenosine-3'-phosphorothioate
  modified_base 23: mod_base = OTHER; note = 2'-O-methyladenosine
atgtagaacattttgacacaaaa

SEQ ID NO: 547 - RNA, 23 nt, synthetic construct
  source 1..23: mol_type = other RNA
  modified_base 1: mod_base = OTHER; note = 5'-methyluridine-3'-phosphate
  modified_base 2: mod_base = OTHER; note = 5'-methyluridine-3'-phosphate
  modified_base 3: mod_base = OTHER; note = 5'-methyluridine-3'-phosphate
  modified_base 4: mod_base = OTHER; note = 5'-methyluridine-3'-phosphate
  modified_base 6: mod_base = OTHER; note = 5'-methyluridine-3'-phosphate
  modified_base 8: mod_base = OTHER; note = 5'-methyluridine-3'-phosphate
  modified_base 14: mod_base = OTHER; note = 5'-methyluridine-3'-phosphate
  modified_base 16: mod_base = OTHER; note = 5'-methyluridine-3'-phosphate
  modified_base 17: mod_base = OTHER; note = 5'-methyluridine-3'-phosphate
  modified_base 19: mod_base = OTHER; note = 5'-methyluridine-3'-phosphate
  modified_base 23: mod_base = OTHER; note = 5'-methyluridine
ttttgtgtcaaaatgttctacat

SEQ ID NO: 548 - RNA, 21 nt, synthetic construct
  source 1..21: mol_type = other RNA
  modified_base 1: mod_base = OTHER; note = 2'-O-methyladenosine-3'-phosphorothioate
  modified_base 2: mod_base = OTHER; note = 2'-O-methyluridine-3'-phosphorothioate
  modified_base 3: mod_base = OTHER; note = 2'-O-methylguanosine-3'-phosphate
  modified_base 4: mod_base = OTHER; note = 2'-O-methylguanosine-3'-phosphate
  modified_base 5: mod_base = OTHER; note = 2'-O-methyluridine-3'-phosphate
  modified_base 6: mod_base = OTHER; note = 2'-deoxy-2'-fluorocytidine-3'-phosphate
  modified_base 7: mod_base = OTHER; note = 2'-deoxy-2'-fluoroadenosine-3'-phosphate
  modified_base 8: mod_base = OTHER; note = 2'-O-methylguanosine-3'-phosphate
  modified_base 9: mod_base = OTHER; note = 2'-deoxy-2'-fluoroadenosine-3'-phosphate
  modified_base 10: mod_base = OTHER; note = 2'-O-methyluridine-3'-phosphate
  modified_base 11: mod_base = OTHER; note = 2'-deoxy-2'-fluorocytidine-3'-phosphate
  modified_base 12: mod_base = OTHER; note = 2'-deoxy-2'-fluorouridine-3'-phosphate
  modified_base 13: mod_base = OTHER; note = 2'-O-methyluridine-3'-phosphate
  modified_base 14: mod_base = OTHER; note = 2'-O-methylcytidine-3'-phosphate
  modified_base 15: mod_base = OTHER; note = 2'-O-methyladenosine-3'-phosphate
  modified_base 16: mod_base = OTHER; note = 2'-O-methyladenosine-3'-phosphate
  modified_base 17: mod_base = OTHER; note = 2'-O-methyladenosine-3'-phosphate
  modified_base 18: mod_base = OTHER; note = 2'-O-methyladenosine-3'-phosphate
  modified_base 19: mod_base = OTHER; note = 2'-deoxy-2'-fluorouridine-3'-phosphate
  modified_base 20: mod_base = OTHER; note = 2'-O-methyladenosine-3'-phosphate
  modified_base 21: mod_base = OTHER; note = 2'-deoxy-2'-fluoroadenosine-3'-phosphate ((2S,4R)-1-[29-[[2-(acetylamino)-2-deoxy-beta-D-galactopyra nosyl]oxy]-14,14-bis[[3-[[3-[[5-[[2-(acetylamino)-2-deoxy-b eta-D-galactopyranosyl]oxy]-1-oxopentyl]amino]propyl]amino] -3-oxopropoxy]methyl]-1,12,19,25-tetraoxo-16-oxa-13,20,24-t riazanonacos-1-yl]-4-hydroxy-2-pyrrolidinyl)methyl ester
atggtcagatcttcaaaataa

SEQ ID NO: 549 - RNA, 23 nt, synthetic construct
  source 1..23: mol_type = other RNA
  modified_base 1: mod_base = OTHER; note = 2'-O-methyluridine-3'-phosphorothioate
  modified_base 2: mod_base = OTHER; note = 2'-deoxy-2'-fluorouridine-3'-phosphorothioate
  modified_base 3: mod_base = OTHER; note = 2'-O-methyladenosine-3'-phosphate
  modified_base 4: mod_base = OTHER; note = 2'-O-methyluridine-3'-phosphate
  modified_base 5: mod_base = OTHER; note = 2'-deoxy-2'-fluorouridine-3'-phosphate
  modified_base 6: mod_base = OTHER; note = 2'-deoxy-2'-fluorouridine-3'-phosphate
  modified_base 7: mod_base = OTHER; note = 2'-O-methyluridine-3'-phosphate
  modified_base 8: mod_base = OTHER; note = 2'-deoxy-2'-fluoroguanosine-3'-phosphate
  modified_base 9: mod_base = OTHER; note = 2'-O-methyladenosine-3'-phosphate
  modified_base 10: mod_base = OTHER; note = 2'-O-methyladenosine-3'-phosphate
  modified_base 11: mod_base = OTHER; note = 2'-O-methylguanosine-3'-phosphate
  modified_base 12: mod_base = OTHER; note = 2'-deoxy-2'-fluoroadenosine-3'-phosphate
  modified_base 13: mod_base = OTHER; note = 2'-O-methyluridine-3'-phosphate
  modified_base 14: mod_base = OTHER; note = 2'-deoxy-2'-fluorocytidine-3'-phosphate
  modified_base 15: mod_base = OTHER; note = 2'-O-methyluridine-3'-phosphate
  modified_base 16: mod_base = OTHER; note = 2'-deoxy-2'-fluoroguanosine-3'-phosphate
  modified_base 17: mod_base = OTHER; note = 2'-O-methyladenosine-3'-phosphate
  modified_base 18: mod_base = OTHER; note = 2'-O-methylcytidine-3'-phosphate
  modified_base 19: mod_base = OTHER; note = 2'-O-methylcytidine-3'-phosphate
  modified_base 20: mod_base = OTHER; note = 2'-O-methyladenosine-3'-phosphate
  modified_base 21: mod_base = OTHER; note = 2'-O-methyluridine-3'-phosphorothioate
  modified_base 22: mod_base = OTHER; note = 2'-O-methyluridine-3'-phosphorothioate
  modified_base 23: mod_base = OTHER; note = 2'-O-methylguanosine
ttattttgaagatctgaccattg

SEQ ID NO: 550 - RNA, 23 nt, synthetic construct
  source 1..23: mol_type = other RNA
  modified_base 4: mod_base = OTHER; note = 5'-methyluridine-3'-phosphate
  modified_base 7: mod_base = OTHER; note = 5'-methyluridine-3'-phosphate
  modified_base 12: mod_base = OTHER; note = 5'-methyluridine-3'-phosphate
  modified_base 14: mod_base = OTHER; note = 5'-methyluridine-3'-phosphate
  modified_base 15: mod_base = OTHER; note = 5'-methyluridine-3'-phosphate
  modified_base 21: mod_base = OTHER; note = 5'-methyluridine-3'-phosphate
caatggtcagatcttcaaaataa

SEQ ID NO: 551 - RNA, 21 nt, synthetic construct
  source 1..21: mol_type = other RNA
  modified_base 1: mod_base = OTHER; note = 2'-O-methylcytidine-3'-phosphorothioate
  modified_base 2: mod_base = OTHER; note = 2'-O-methyladenosine-3'-phosphorothioate
  modified_base 3: mod_base = OTHER; note = 2'-deoxy-2'-fluorouridine-3'-phosphate
  modified_base 4: mod_base = OTHER; note = 2'-O-methylguanosine-3'-phosphate
  modified_base 5: mod_base = OTHER; note = 2'-deoxy-2'-fluorouridine-3'-phosphate
  modified_base 6: mod_base = OTHER; note = 2'-O-methylguanosine-3'-phosphate
  modified_base 7: mod_base = OTHER; note = 2'-deoxy-2'-fluorocytidine-3'-phosphate
  modified_base 8: mod_base = OTHER; note = 2'-O-methyladenosine-3'-phosphate
  modified_base 9: mod_base = OTHER; note = 2'-deoxy-2'-fluorocytidine-3'-phosphate
  modified_base 10: mod_base = OTHER; note = 2'-deoxy-2'-fluoroadenosine-3'-phosphate
  modified_base 11: mod_base = OTHER; note = 2'-deoxy-2'-fluorouridine-3'-phosphate
  modified_base 12: mod_base = OTHER; note = 2'-O-methyluridine-3'-phosphate
  modified_base 13: mod_base = OTHER; note = 2'-deoxy-2'-fluoroguanosine-3'-phosphate
  modified_base 14: mod_base = OTHER; note = 2'-O-methyladenosine-3'-phosphate
  modified_base 15: mod_base = OTHER; note = 2'-deoxy-2'-fluoroadenosine-3'-phosphate
  modified_base 16: mod_base = OTHER; note = 2'-O-methyladenosine-3'-phosphate
  modified_base 17: mod_base = OTHER; note = 2'-deoxy-2'-fluoroadenosine-3'-phosphate
  modified_base 18: mod_base = OTHER; note = 2'-O-methylcytidine-3'-phosphate
  modified_base 19: mod_base = OTHER; note = 2'-deoxy-2'-fluorouridine-3'-phosphate
  modified_base 20: mod_base = OTHER; note = 2'-O-methylguanosine-3'-phosphate
  modified_base 21: mod_base = OTHER; note = 2'-O-methyluridine-3'-phosphate ((2S,4R)-1-[29-[[2-(acetylamino)-2-deoxy-beta-D-galactopyra nosyl]oxy]-14,14-bis[[3-[[3-[[5-[[2-(acetylamino)-2-deoxy-b eta-D-galactopyranosyl]oxy]-1-oxopentyl]amino]propyl]amino] -3-oxopropoxy]methyl]-1,12,19,25-tetraoxo-16-oxa-13,20,24-t riazanonacos-1-yl]-4-hydroxy-2-pyrrolidinyl)methyl ester
catgtgcacattgaaaactgt

SEQ ID NO: 552 - RNA, 23 nt, synthetic construct
  source 1..23: mol_type = other RNA
  modified_base 1: mod_base = OTHER; note = 2'-O-methyladenosine-3'-phosphorothioate
  modified_base 2: mod_base = OTHER; note = 2'-deoxy-2'-fluorocytidine-3'-phosphorothioate
  modified_base 3: mod_base = OTHER; note = 2'-O-methyladenosine-3'-phosphate
  modified_base 4: mod_base = OTHER; note = 2'-deoxy-2'-fluoroguanosine-3'-phosphate
  modified_base 5: mod_base = OTHER; note = 2'-O-methyluridine-3'-phosphate
  modified_base 6: mod_base = OTHER; note = 2'-deoxy-2'-fluorouridine-3'-phosphate
  modified_base 7: mod_base = OTHER; note = 2'-O-methyluridine-3'-phosphate
  modified_base 8: mod_base = OTHER; note = 2'-deoxy-2'-fluorouridine-3'-phosphate
  modified_base 9: mod_base = OTHER; note = 2'-O-methylcytidine-3'-phosphate
  modified_base 10: mod_base = OTHER; note = 2'-deoxy-2'-fluoroadenosine-3'-phosphate
  modified_base 11: mod_base = OTHER; note = 2'-O-methyladenosine-3'-phosphate
  modified_base 12: mod_base = OTHER; note = 2'-O-methyluridine-3'-phosphate
  modified_base 13: mod_base = OTHER; note = 2'-O-methylguanosine-3'-phosphate
  modified_base 14: mod_base = OTHER; note = 2'-deoxy-2'-fluorouridine-3'-phosphate
  modified_base 15: mod_base = OTHER; note = 2'-O-methylguanosine-3'-phosphate
  modified_base 16: mod_base = OTHER; note = 2'-deoxy-2'-fluorocytidine-3'-phosphate
  modified_base 17: mod_base = OTHER; note = 2'-O-methyladenosine-3'-phosphate
  modified_base 18: mod_base = OTHER; note = 2'-deoxy-2'-fluorocytidine-3'-phosphate
  modified_base 19: mod_base = OTHER; note = 2'-O-methyladenosine-3'-phosphate
  modified_base 20: mod_base = OTHER; note = 2'-deoxy-2'-fluorouridine-3'-phosphate
  modified_base 21: mod_base = OTHER; note = 2'-O-methylguanosine-3'-phosphorothioate
  modified_base 22: mod_base = OTHER; note = 2'-O-methylcytidine-3'-phosphorothioate
  modified_base 23: mod_base = OTHER; note = 2'-O-methylguanosine
acagttttcaatgtgcacatgcg

SEQ ID NO: 553 - RNA, 23 nt, synthetic construct
  source 1..23: mol_type = other RNA
  modified_base 5: mod_base = OTHER; note = 5'-methyluridine-3'-phosphate
  modified_base 7: mod_base = OTHER; note = 5'-methyluridine-3'-phosphate
  modified_base 13: mod_base = OTHER; note = 5'-methyluridine-3'-phosphate
  modified_base 14: mod_base = OTHER; note = 5'-methyluridine-3'-phosphate
  modified_base 21: mod_base = OTHER; note = 5'-methyluridine-3'-phosphate
  modified_base 23: mod_base = OTHER; note = 5'-methyluridine
cgcatgtgcacattgaaaactgt

SEQ ID NO: 554 - RNA, 21 nt, synthetic construct
  source 1..21: mol_type = other RNA
  modified_base 1: mod_base = OTHER; note = 2'-O-methyluridine-3'-phosphorothioate
  modified_base 2: mod_base = OTHER; note = 2'-O-methyluridine-3'-phosphorothioate
  modified_base 3: mod_base = OTHER; note = 2'-deoxy-2'-fluoroguanosine-3'-phosphate
  modified_base 4: mod_base = OTHER; note = 2'-O-methyluridine-3'-phosphate
  modified_base 5: mod_base = OTHER; note = 2'-deoxy-2'-fluoroguanosine-3'-phosphate
  modified_base 6: mod_base = OTHER; note = 2'-O-methyluridine-3'-phosphate
  modified_base 7: mod_base = OTHER; note = 2'-deoxy-2'-fluorocytidine-3'-phosphate
  modified_base 8: mod_base = OTHER; note = 2'-O-methyladenosine-3'-phosphate
  modified_base 9: mod_base = OTHER; note = 2'-deoxy-2'-fluoroadenosine-3'-phosphate
  modified_base 10: mod_base = OTHER; note = 2'-deoxy-2'-fluoroadenosine-3'-phosphate
  modified_base 11: mod_base = OTHER; note = 2'-deoxy-2'-fluoroadenosine-3'-phosphate
  modified_base 12: mod_base = OTHER; note = 2'-O-methyluridine-3'-phosphate
  modified_base 13: mod_base = OTHER; note = 2'-deoxy-2'-fluoroguanosine-3'-phosphate
  modified_base 14: mod_base = OTHER; note = 2'-O-methyluridine-3'-phosphate
  modified_base 15: mod_base = OTHER; note = 2'-deoxy-2'-fluorouridine-3'-phosphate
  modified_base 16: mod_base = OTHER; note = 2'-O-methylcytidine-3'-phosphate
  modified_base 17: mod_base = OTHER; note = 2'-deoxy-2'-fluorouridine-3'-phosphate
  modified_base 18: mod_base = OTHER; note = 2'-O-methyladenosine-3'-phosphate
  modified_base 19: mod_base = OTHER; note = 2'-deoxy-2'-fluorocytidine-3'-phosphate
  modified_base 20: mod_base = OTHER; note = 2'-O-methyladenosine-3'-phosphate
  modified_base 21: mod_base = OTHER; note = 2'-O-methyluridine-3'-phosphate ((2S,4R)-1-[29-[[2-(acetylamino)-2-deoxy-beta-D-galactopyra nosyl]oxy]-14,14-bis[[3-[[3-[[5-[[2-(acetylamino)-2-deoxy-b eta-D-galactopyranosyl]oxy]-1-oxopentyl]amino]propyl]amino] -3-oxopropoxy]methyl]-1,12,19,25-tetraoxo-16-oxa-13,20,24-t riazanonacos-1-yl]-4-hydroxy-2-pyrrolidinyl)methyl ester
ttgtgtcaaaatgttctacat

SEQ ID NO: 555 - RNA, 23 nt, synthetic construct
  source 1..23: mol_type = other RNA
  modified_base 1: mod_base = OTHER; note = 2'-O-methyladenosine-3'-phosphorothioate
  modified_base 2: mod_base = OTHER; note = 2'-deoxy-2'-fluorouridine-3'-phosphorothioate
  modified_base 3: mod_base = OTHER; note = 2'-O-methylguanosine-3'-phosphate
  modified_base 4: mod_base = OTHER; note = 2'-O-methyluridine-3'-phosphate
  modified_base 5: mod_base = OTHER; note = 2'-O-methyladenosine-3'-phosphate
  modified_base 6: mod_base = OTHER; note = 2'-deoxy-2'-fluoroguanosine-3'-phosphate
  modified_base 7: mod_base = OTHER; note = 2'-O-methyladenosine-3'-phosphate
  modified_base 8: mod_base = OTHER; note = 2'-deoxy-2'-fluoroadenosine-3'-phosphate
  modified_base 9: mod_base = OTHER; note = 2'-deoxy-2'-fluorocytidine-3'-phosphate
  modified_base 10: mod_base = OTHER; note = 2'-O-methyladenosine-3'-phosphate
  modified_base 11: mod_base = OTHER; note = 2'-O-methyluridine-3'-phosphate
  modified_base 12: mod_base = OTHER; note = 2'-O-methyluridine-3'-phosphate
  modified_base 13: mod_base = OTHER; note = 2'-O-methyluridine-3'-phosphate
  modified_base 14: mod_base = OTHER; note = 2'-deoxy-2'-fluorouridine-3'-phosphate
  modified_base 15: mod_base = OTHER; note = 2'-O-methylguanosine-3'-phosphate
  modified_base 16: mod_base = OTHER; note = 2'-deoxy-2'-fluoroadenosine-3'-phosphate
  modified_base 17: mod_base = OTHER; note = 2'-O-methylcytidine-3'-phosphate
  modified_base 18: mod_base = OTHER; note = 2'-O-methyladenosine-3'-phosphate
  modified_base 19: mod_base = OTHER; note = 2'-O-methylcytidine-3'-phosphate
  modified_base 20: mod_base = OTHER; note = 2'-O-methyladenosine-3'-phosphate
  modified_base 21: mod_base = OTHER; note = 2'-O-methyladenosine-3'-phosphorothioate
  modified_base 22: mod_base = OTHER; note = 2'-O-methyladenosine-3'-phosphorothioate
  modified_base 23: mod_base = OTHER; note = 2'-O-methyladenosine
atgtagaacattttgacacaaaa

SEQ ID NO: 556 - RNA, 23 nt, synthetic construct
  source 1..23: mol_type = other RNA
  modified_base 1: mod_base = OTHER; note = 5'-methyluridine-3'-phosphate
  modified_base 2: mod_base = OTHER; note = 5'-methyluridine-3'-phosphate
  modified_base 3: mod_base = OTHER; note = 5'-methyluridine-3'-phosphate
  modified_base 4: mod_base = OTHER; note = 5'-methyluridine-3'-phosphate
  modified_base 6: mod_base = OTHER; note = 5'-methyluridine-3'-phosphate
  modified_base 8: mod_base = OTHER; note = 5'-methyluridine-3'-phosphate
  modified_base 14: mod_base = OTHER; note = 5'-methyluridine-3'-phosphate
  modified_base 16: mod_base = OTHER; note = 5'-methyluridine-3'-phosphate
  modified_base 17: mod_base = OTHER; note = 5'-methyluridine-3'-phosphate
  modified_base 19: mod_base = OTHER; note = 5'-methyluridine-3'-phosphate
  modified_base 23: mod_base = OTHER; note = 5'-methyluridine
ttttgtgtcaaaatgttctacat

SEQ ID NO: 557 - RNA, 21 nt, synthetic construct
  source 1..21: mol_type = other RNA
  modified_base 1: mod_base = OTHER; note = 2'-O-methyluridine-3'-phosphorothioate
  modified_base 2: mod_base = OTHER; note = 2'-O-methylcytidine-3'-phosphorothioate
  modified_base 3: mod_base = OTHER; note = 2'-O-methyladenosine-3'-phosphate
  modified_base 4: mod_base = OTHER; note = 2'-O-methyladenosine-3'-phosphate
  modified_base 5: mod_base = OTHER; note = 2'-O-methyladenosine-3'-phosphate
  modified_base 6: mod_base = OTHER; note = 2'-O-methylcytidine-3'-phosphate
  modified_base 7: mod_base = OTHER; note = 2'-deoxy-2'-fluorouridine-3'-phosphate
  modified_base 8: mod_base = OTHER; note = 2'-O-methyluridine-3'-phosphate
  modified_base 9: mod_base = OTHER; note = 2'-deoxy-2'-fluoroguanosine-3'-phosphate
  modified_base 10: mod_base = OTHER; note = 2'-deoxy-2'-fluoroadenosine-3'-phosphate
  modified_base 11: mod_base = OTHER; note = 2'-deoxy-2'-fluoroadenosine-3'-phosphate
  modified_base 12: mod_base = OTHER; note = 2'-O-methyluridine-3'-phosphate
  modified_base 13: mod_base = OTHER; note = 2'-O-methyladenosine-3'-phosphate
  modified_base 14: mod_base = OTHER; note = 2'-O-methyluridine-3'-phosphate
  modified_base 15: mod_base = OTHER; note = 2'-O-methyluridine-3'-phosphate
  modified_base 16: mod_base = OTHER; note = 2'-O-methylcytidine-3'-phosphate
  modified_base 17: mod_base = OTHER; note = 2'-O-methyluridine-3'-phosphate
  modified_base 18: mod_base = OTHER; note = 2'-O-methyluridine-3'-phosphate
  modified_base 19: mod_base = OTHER; note = 2'-O-methylcytidine-3'-phosphate
  modified_base 20: mod_base = OTHER; note = 2'-O-methyladenosine-3'-phosphate
  modified_base 21: mod_base = OTHER; note = 2'-O-methyladenosine-3'-phosphate ((2S,4R)-1-[29-[[2-(acetylamino)-2-deoxy-beta-D-galactopyra nosyl]oxy]-14,14-bis[[3-[[3-[[5-[[2-(acetylamino)-2-deoxy-b eta-D-galactopyranosyl]oxy]-1-oxopentyl]amino]propyl]amino] -3-oxopropoxy]methyl]-1,12,19,25-tetraoxo-16-oxa-13,20,24-t riazanonacos-1-yl]-4-hydroxy-2-pyrrolidinyl)methyl ester
tcaaacttgaatattcttcaa

SEQ ID NO: 558 - RNA, 23 nt, synthetic construct
  source 1..23: mol_type = other RNA
  modified_base 1: mod_base = OTHER; note = 2'-O-methyluridine-3'-phosphorothioate
  modified_base 2: mod_base = OTHER; note = 2'-deoxy-2'-fluorouridine-3'-phosphorothioate
  modified_base 3: mod_base = OTHER; note = 2'-O-methylguanosine-3'-phosphate
  modified_base 4: mod_base = OTHER; note = 2'-O-methyladenosine-3'-phosphate
  modified_base 5: mod_base = OTHER; note = 2'-O-methyladenosine-3'-phosphate
  modified_base 6: mod_base = OTHER; note = 2'-deoxy-2'-fluoroguanosine-3'-phosphate
  modified_base 7: mod_base = OTHER; note = 2'-O-methyladenosine-3'-phosphate
  modified_base 8: mod_base = OTHER; note = 2'-deoxy-2'-fluoroadenosine-3'-phosphate
  modified_base 9: mod_base = OTHER; note = 2'-deoxy-2'-fluorouridine-3'-phosphate
  modified_base 10: mod_base = OTHER; note = 2'-O-methyladenosine-3'-phosphate
  modified_base 11: mod_base = OTHER; note = 2'-O-methyluridine-3'-phosphate
  modified_base 12: mod_base = OTHER; note = 2'-O-methyluridine-3'-phosphate
  modified_base 13: mod_base = OTHER; note = 2'-O-methylcytidine-3'-phosphate
  modified_base 14: mod_base = OTHER; note = 2'-deoxy-2'-fluoroadenosine-3'-phosphate
  modified_base 15: mod_base = OTHER; note = 2'-O-methyladenosine-3'-phosphate
  modified_base 16: mod_base = OTHER; note = 2'-deoxy-2'-fluoroguanosine-3'-phosphate
  modified_base 17: mod_base = OTHER; note = 2'-O-methyluridine-3'-phosphate
  modified_base 18: mod_base = OTHER; note = 2'-O-methyluridine-3'-phosphate
  modified_base 19: mod_base = OTHER; note = 2'-O-methyluridine-3'-phosphate
  modified_base 20: mod_base = OTHER; note = 2'-O-methylguanosine-3'-phosphate
  modified_base 21: mod_base = OTHER; note = 2'-O-methyladenosine-3'-phosphorothioate
  modified_base 22: mod_base = OTHER; note = 2'-O-methyladenosine-3'-phosphorothioate
  modified_base 23: mod_base = OTHER; note = 2'-O-methyluridine
ttgaagaatattcaagtttgaat

SEQ ID NO: 559 - RNA, 23 nt, synthetic construct
  source 1..23: mol_type = other RNA
  modified_base 2: mod_base = OTHER; note = 5'-methyluridine-3'-phosphate
  modified_base 3: mod_base = OTHER; note = 5'-methyluridine-3'-phosphate
  modified_base 9: mod_base = OTHER; note = 5'-methyluridine-3'-phosphate
  modified_base 10: mod_base = OTHER; note = 5'-methyluridine-3'-phosphate
  modified_base 14: mod_base = OTHER; note = 5'-methyluridine-3'-phosphate
  modified_base 16: mod_base = OTHER; note = 5'-methyluridine-3'-phosphate
  modified_base 17: mod_base = OTHER; note = 5'-methyluridine-3'-phosphate
  modified_base 19: mod_base = OTHER; note = 5'-methyluridine-3'-phosphate
  modified_base 20: mod_base = OTHER; note = 5'-methyluridine-3'-phosphate
attcaaacttgaatattcttcaa

SEQ ID NO: 560 - RNA, 21 nt, synthetic construct
  source 1..21: mol_type = other RNA
  modified_base 1: mod_base = OTHER; note = 2'-O-methyluridine-3'-phosphorothioate
  modified_base 2: mod_base = OTHER; note = 2'-O-methyluridine-3'-phosphorothioate
  modified_base 3: mod_base = OTHER; note = 2'-O-methylguanosine-3'-phosphate
  modified_base 4: mod_base = OTHER; note = 2'-O-methyluridine-3'-phosphate
  modified_base 5: mod_base = OTHER; note = 2'-O-methylguanosine-3'-phosphate
  modified_base 6: mod_base = OTHER; note = 2'-O-methyluridine-3'-phosphate
  modified_base 7: mod_base = OTHER; note = 2'-deoxy-2'-fluorocytidine-3'-phosphate
  modified_base 8: mod_base = OTHER; note = 2'-O-methyladenosine-3'-phosphate
  modified_base 9: mod_base = OTHER; note = 2'-deoxy-2'-fluoroadenosine-3'-phosphate
  modified_base 10: mod_base = OTHER; note = 2'-O-methyladenosine-3'-phosphate
  modified_base 11: mod_base = OTHER; note = 2'-deoxy-2'-fluoroadenosine-3'-phosphate
  modified_base 12: mod_base = OTHER; note = 2'-O-methyluridine-3'-phosphate
  modified_base 13: mod_base = OTHER; note = 2'-O-methylguanosine-3'-phosphate
  modified_base 14: mod_base = OTHER; note = 2'-O-methyluridine-3'-phosphate
  modified_base 15: mod_base = OTHER; note = 2'-O-methyluridine-3'-phosphate
  modified_base 16: mod_base = OTHER; note = 2'-O-methylcytidine-3'-phosphate
  modified_base 17: mod_base = OTHER; note = 2'-O-methyluridine-3'-phosphate
  modified_base 18: mod_base = OTHER; note = 2'-O-methyladenosine-3'-phosphate
  modified_base 19: mod_base = OTHER; note = 2'-O-methylcytidine-3'-phosphate
  modified_base 20: mod_base = OTHER; note = 2'-O-methyladenosine-3'-phosphate
  modified_base 21: mod_base = OTHER; note = 2'-O-methyluridine-3'-phosphate ((2S,4R)-1-[29-[[2-(acetylamino)-2-deoxy-beta-D-galactopyra nosyl]oxy]-14,14-bis[[3-[[3-[[5-[[2-(acetylamino)-2-deoxy-b eta-D-galactopyranosyl]oxy]-1-oxopentyl]amino]propyl]amino] -3-oxopropoxy]methyl]-1,12,19,25-tetraoxo-16-oxa-13,20,24-t riazanonacos-1-yl]-4-hydroxy-2-pyrrolidinyl)methyl ester
ttgtgtcaaaatgttctacat

SEQ ID NO: 561 - RNA, 23 nt, synthetic construct
  source 1..23: mol_type = other RNA
  modified_base 1: mod_base = OTHER; note = 2'-O-methyladenosine-3'-phosphorothioate
  modified_base 2: mod_base = OTHER; note = 2'-deoxy-2'-fluorouridine-3'-phosphorothioate
  modified_base 3: mod_base = OTHER; note = 2'-O-methylguanosine-3'-phosphate
  modified_base 4: mod_base = OTHER; note = 2'-O-methyluridine-3'-phosphate
  modified_base 5: mod_base = OTHER; note = 2'-O-methyladenosine-3'-phosphate
  modified_base 6: mod_base = OTHER; note = 2'-O-methylguanosine-3'-phosphate
  modified_base 7: mod_base = OTHER; note = 2'-O-methyladenosine-3'-phosphate
  modified_base 8: mod_base = OTHER; note = Adenosine-glycol nucleic acid (GNA), S-isomer
  modified_base 9: mod_base = OTHER; note = 2'-O-methylcytidine-3'-phosphate
  modified_base 10: mod_base = OTHER; note = 2'-O-methyladenosine-3'-phosphate
  modified_base 11: mod_base = OTHER; note = 2'-O-methyluridine-3'-phosphate
  modified_base 12: mod_base = OTHER; note = 2'-deoxy-2'-fluorouridine-3'-phosphate
  modified_base 13: mod_base = OTHER; note = 2'-O-methyluridine-3'-phosphate
  modified_base 14: mod_base = OTHER; note = 2'-deoxy-2'-fluorouridine-3'-phosphate
  modified_base 15: mod_base = OTHER; note = 2'-O-methylguanosine-3'-phosphate
  modified_base 16: mod_base = OTHER; note = 2'-deoxy-2'-fluoroadenosine-3'-phosphate
  modified_base 17: mod_base = OTHER; note = 2'-O-methylcytidine-3'-phosphate
  modified_base 18: mod_base = OTHER; note = 2'-O-methyladenosine-3'-phosphate
  modified_base 19: mod_base = OTHER; note = 2'-O-methylcytidine-3'-phosphate
  modified_base 20: mod_base = OTHER; note = 2'-O-methyladenosine-3'-phosphate
  modified_base 21: mod_base = OTHER; note = 2'-O-methyladenosine-3'-phosphorothioate
  modified_base 22: mod_base = OTHER; note = 2'-O-methyladenosine-3'-phosphorothioate
  modified_base 23: mod_base = OTHER; note = 2'-O-methyladenosine
atgtagaacattttgacacaaaa

SEQ ID NO: 562 - RNA, 23 nt, synthetic construct
  source 1..23: mol_type = other RNA
  modified_base 1: mod_base = OTHER; note = 5'-methyluridine-3'-phosphate
  modified_base 2: mod_base = OTHER; note = 5'-methyluridine-3'-phosphate
  modified_base 3: mod_base = OTHER; note = 5'-methyluridine-3'-phosphate
  modified_base 4: mod_base = OTHER; note = 5'-methyluridine-3'-phosphate
  modified_base 6: mod_base = OTHER; note = 5'-methyluridine-3'-phosphate
  modified_base 8: mod_base = OTHER; note = 5'-methyluridine-3'-phosphate
  modified_base 14: mod_base = OTHER; note = 5'-methyluridine-3'-phosphate
  modified_base 16: mod_base = OTHER; note = 5'-methyluridine-3'-phosphate
  modified_base 17: mod_base = OTHER; note = 5'-methyluridine-3'-phosphate
  modified_base 19: mod_base = OTHER; note = 5'-methyluridine-3'-phosphate
  modified_base 23: mod_base = OTHER; note = 5'-methyluridine
ttttgtgtcaaaatgttctacat

SEQ ID NO: 563 - RNA, 21 nt, synthetic construct
  source 1..21: mol_type = other RNA
  modified_base 1: mod_base = OTHER; note = 2'-O-methylcytidine-3'-phosphorothioate
  modified_base 2: mod_base = OTHER; note = 2'-O-methyladenosine-3'-phosphorothioate
  modified_base 3: mod_base = OTHER; note = 2'-O-methyluridine-3'-phosphate
  modified_base 4: mod_base = OTHER; note = 2'-O-methylguanosine-3'-phosphate
  modified_base 5: mod_base = OTHER; note = 2'-O-methyluridine-3'-phosphate
  modified_base 6: mod_base = OTHER; note = 2'-O-methylguanosine-3'-phosphate
  modified_base 7: mod_base = OTHER; note = 2'-deoxy-2'-fluorocytidine-3'-phosphate
  modified_base 8: mod_base = OTHER; note = 2'-O-methyladenosine-3'-phosphate
  modified_base 9: mod_base = OTHER; note = 2'-deoxy-2'-fluorocytidine-3'-phosphate
  modified_base 10: mod_base = OTHER; note = 2'-O-methyladenosine-3'-phosphate
  modified_base 11: mod_base = OTHER; note = 2'-deoxy-2'-fluorouridine-3'-phosphate
  modified_base 12: mod_base = OTHER; note = 2'-O-methyluridine-3'-phosphate
  modified_base 13: mod_base = OTHER; note = 2'-O-methylguanosine-3'-phosphate
  modified_base 14: mod_base = OTHER; note = 2'-O-methyladenosine-3'-phosphate
  modified_base 15: mod_base = OTHER; note = 2'-O-methyladenosine-3'-phosphate
  modified_base 16: mod_base = OTHER; note = 2'-O-methyladenosine-3'-phosphate
  modified_base 17: mod_base = OTHER; note = 2'-O-methyladenosine-3'-phosphate
  modified_base 18: mod_base = OTHER; note = 2'-O-methylcytidine-3'-phosphate
  modified_base 19: mod_base = OTHER; note = 2'-O-methyluridine-3'-phosphate
  modified_base 20: mod_base = OTHER; note = 2'-O-methylguanosine-3'-phosphate
  modified_base 21: mod_base = OTHER; note = 2'-O-methyluridine-3'-phosphate ((2S,4R)-1-[29-[[2-(acetylamino)-2-deoxy-beta-D-galactopyra nosyl]oxy]-14,14-bis[[3-[[3-[[5-[[2-(acetylamino)-2-deoxy-b eta-D-galactopyranosyl]oxy]-1-oxopentyl]amino]propyl]amino] -3-oxopropoxy]methyl]-1,12,19,25-tetraoxo-16-oxa-13,20,24-t riazanonacos-1-yl]-4-hydroxy-2-pyrrolidinyl)methyl ester
catgtgcacattgaaaactgt

SEQ ID NO: 564 - RNA, 23 nt, synthetic construct
  source 1..23: mol_type = other RNA
  modified_base 1: mod_base = OTHER; note = 2'-O-methyladenosine-3'-phosphorothioate
  modified_base 2: mod_base = OTHER; note = 2'-deoxy-2'-fluorocytidine-3'-phosphorothioate
  modified_base 3: mod_base = OTHER; note = 2'-O-methyladenosine-3'-phosphate
  modified_base 4: mod_base = OTHER; note = 2'-O-methylguanosine-3'-phosphate
  modified_base 5: mod_base = OTHER; note = 2'-O-methyluridine-3'-phosphate
  modified_base 6: mod_base = OTHER; note = 2'-deoxy-2'-fluorouridine-3'-phosphate
  modified_base 7: mod_base = OTHER; note = 2'-O-methyluridine-3'-phosphate
  modified_base 8: mod_base = OTHER; note = 2'-deoxy-2'-fluorouridine-3'-phosphate
  modified_base 9: mod_base = OTHER; note = 2'-deoxy-2'-fluorocytidine-3'-phosphate
  modified_base 10: mod_base = OTHER; note = 2'-O-methyladenosine-3'-phosphate
  modified_base 11: mod_base = OTHER; note = 2'-O-methyladenosine-3'-phosphate
  modified_base 12: mod_base = OTHER; note = 2'-deoxy-2'-fluorouridine-3'-phosphate
  modified_base 13: mod_base = OTHER; note = 2'-O-methylguanosine-3'-phosphate
  modified_base 14: mod_base = OTHER; note = 2'-deoxy-2'-fluorouridine-3'-phosphate
  modified_base 15: mod_base = OTHER; note = 2'-O-methylguanosine-3'-phosphate
  modified_base 16: mod_base = OTHER; note = 2'-deoxy-2'-fluorocytidine-3'-phosphate
  modified_base 17: mod_base = OTHER; note = 2'-O-methyladenosine-3'-phosphate
  modified_base 18: mod_base = OTHER; note = 2'-O-methylcytidine-3'-phosphate
  modified_base 19: mod_base = OTHER; note = 2'-O-methyladenosine-3'-phosphate
  modified_base 20: mod_base = OTHER; note = 2'-O-methyluridine-3'-phosphate
  modified_base 21: mod_base = OTHER; note = 2'-O-methylguanosine-3'-phosphorothioate
  modified_base 22: mod_base = OTHER; note = 2'-O-methylcytidine-3'-phosphorothioate
  modified_base 23: mod_base = OTHER; note = 2'-O-methylguanosine
acagttttcaatgtgcacatgcg

SEQ ID NO: 565 - RNA, 23 nt, synthetic construct
  source 1..23: mol_type = other RNA
  modified_base 5: mod_base = OTHER; note = 5'-methyluridine-3'-phosphate
  modified_base 7: mod_base = OTHER; note = 5'-methyluridine-3'-phosphate
  modified_base 13: mod_base = OTHER; note = 5'-methyluridine-3'-phosphate
  modified_base 14: mod_base = OTHER; note = 5'-methyluridine-3'-phosphate
  modified_base 21: mod_base = OTHER; note = 5'-methyluridine-3'-phosphate
  modified_base 23: mod_base = OTHER; note = 5'-methyluridine
cgcatgtgcacattgaaaactgt

SEQ ID NO: 566 - RNA, 21 nt, synthetic construct
  source 1..21: mol_type = other RNA
  modified_base 1: mod_base = OTHER; note = 2'-O-methylcytidine-3'-phosphorothioate
  modified_base 2: mod_base = OTHER; note = 2'-O-methyladenosine-3'-phosphorothioate
  modified_base 3: mod_base = OTHER; note = 2'-O-methyluridine-3'-phosphate
  modified_base 4: mod_base = OTHER; note = 2'-O-methylguanosine-3'-phosphate
  modified_base 5: mod_base = OTHER; note = 2'-O-methyluridine-3'-phosphate
  modified_base 6: mod_base = OTHER; note = 2'-O-methylguanosine-3'-phosphate
  modified_base 7: mod_base = OTHER; note = 2'-deoxy-2'-fluorocytidine-3'-phosphate
  modified_base 8: mod_base = OTHER; note = 2'-O-methyladenosine-3'-phosphate
  modified_base 9: mod_base = OTHER; note = 2'-deoxy-2'-fluorocytidine-3'-phosphate
  modified_base 10: mod_base = OTHER; note = 2'-O-methyladenosine-3'-phosphate
  modified_base 11: mod_base = OTHER; note = 2'-deoxy-2'-fluorouridine-3'-phosphate
  modified_base 12: mod_base = OTHER; note = 2'-O-methyluridine-3'-phosphate
  modified_base 13: mod_base = OTHER; note = 2'-O-methylguanosine-3'-phosphate
  modified_base 14: mod_base = OTHER; note = 2'-O-methyladenosine-3'-phosphate
  modified_base 15: mod_base = OTHER; note = 2'-O-methyladenosine-3'-phosphate
  modified_base 16: mod_base = OTHER; note = 2'-O-methyladenosine-3'-phosphate
  modified_base 17: mod_base = OTHER; note = 2'-O-methyladenosine-3'-phosphate
  modified_base 18: mod_base = OTHER; note = 2'-O-methylcytidine-3'-phosphate
  modified_base 19: mod_base = OTHER; note = 2'-O-methyluridine-3'-phosphate
  modified_base 20: mod_base = OTHER; note = 2'-O-methylguanosine-3'-phosphate
  modified_base 21: mod_base = OTHER; note = 2'-O-methyluridine-3'-phosphate ((2S,4R)-1-[29-[[2-(acetylamino)-2-deoxy-beta-D-galactopyra nosyl]oxy]-14,14-bis[[3-[[3-[[5-[[2-(acetylamino)-2-deoxy-b eta-D-galactopyranosyl]oxy]-1-oxopentyl]amino]propyl]amino] -3-oxopropoxy]methyl]-1,12,19,25-tetraoxo-16-oxa-13,20,24-t riazanonacos-1-yl]-4-hydroxy-2-pyrrolidinyl)methyl ester
catgtgcacattgaaaactgt

SEQ ID NO: 567 - RNA, 23 nt, synthetic construct
  source 1..23: mol_type = other RNA
  modified_base 1: mod_base = OTHER; note = 2'-O-methyladenosine-3'-phosphorothioate
  modified_base 2: mod_base = OTHER; note = 2'-deoxy-2'-fluorocytidine-3'-phosphorothioate
  modified_base 3: mod_base = OTHER; note = 2'-O-methyladenosine-3'-phosphate
  modified_base 4: mod_base = OTHER; note = 2'-O-methylguanosine-3'-phosphate
  modified_base 5: mod_base = OTHER; note = 2'-O-methyluridine-3'-phosphate
  modified_base 6: mod_base = OTHER; note = 2'-deoxy-2'-fluorouridine-3'-phosphate
  modified_base 7: mod_base = OTHER; note = 2'-O-methyluridine-3'-phosphate
  modified_base 8: mod_base = OTHER; note = 2'-deoxy-2'-fluorouridine-3'-phosphate
  modified_base 9: mod_base = OTHER; note = 2'-deoxy-2'-fluorocytidine-3'-phosphate
  modified_base 10: mod_base = OTHER; note = 2'-O-methyladenosine-3'-phosphate
  modified_base 11: mod_base = OTHER; note = 2'-O-methyladenosine-3'-phosphate
  modified_base 12: mod_base = OTHER; note = 2'-deoxy-2'-fluorouridine-3'-phosphate
  modified_base 13: mod_base = OTHER; note = 2'-O-methylguanosine-3'-phosphate
  modified_base 14: mod_base = OTHER; note = 2'-deoxy-2'-fluorouridine-3'-phosphate
  modified_base 15: mod_base = OTHER; note = 2'-O-methylguanosine-3'-phosphate
  modified_base 16: mod_base = OTHER; note = 2'-deoxy-2'-fluorocytidine-3'-phosphate
  modified_base 17: mod_base = OTHER; note = 2'-O-methyladenosine-3'-phosphate
  modified_base 18: mod_base = OTHER; note = 2'-O-methylcytidine-3'-phosphate
  modified_base 19: mod_base = OTHER; note = 2'-O-methyladenosine-3'-phosphate
  modified_base 20: mod_base = OTHER; note = 2'-O-methyluridine-3'-phosphate
  modified_base 21: mod_base = OTHER; note = 2'-O-methylguanosine-3'-phosphorothioate
  modified_base 22: mod_base = OTHER; note = 2'-O-methylcytidine-3'-phosphorothioate
  modified_base 23: mod_base = OTHER; note = 2'-O-methylguanosine
acagttttcaatgtgcacatgcg

SEQ ID NO: 568 - RNA, 23 nt, synthetic construct
  source 1..23: mol_type = other RNA
  modified_base 5: mod_base = OTHER; note = 5'-methyluridine-3'-phosphate
  modified_base 7: mod_base = OTHER; note = 5'-methyluridine-3'-phosphate
  modified_base 13: mod_base = OTHER; note = 5'-methyluridine-3'-phosphate
  modified_base 14: mod_base = OTHER; note = 5'-methyluridine-3'-phosphate
  modified_base 21: mod_base = OTHER; note = 5'-methyluridine-3'-phosphate
  modified_base 23: mod_base = OTHER; note = 5'-methyluridine
cgcatgtgcacattgaaaactgt

SEQ ID NO: 569 - RNA, 21 nt, synthetic construct
  source 1..21: mol_type = other RNA
  modified_base 1: mod_base = OTHER; note = 2'-O-methyluridine-3'-phosphorothioate
  modified_base 2: mod_base = OTHER; note = 2'-O-methyluridine-3'-phosphorothioate
  modified_base 3: mod_base = OTHER; note = 2'-O-methylcytidine-3'-phosphate
  modified_base 4: mod_base = OTHER; note = 2'-O-methyladenosine-3'-phosphate
  modified_base 5: mod_base = OTHER; note = 2'-O-methyluridine-3'-phosphate
  modified_base 6: mod_base = OTHER; note = 2'-O-methyluridine-3'-phosphate
  modified_base 7: mod_base = OTHER; note = 2'-deoxy-2'-fluorocytidine-3'-phosphate
  modified_base 8: mod_base = OTHER; note = 2'-O-methyladenosine-3'-phosphate
  modified_base 9: mod_base = OTHER; note = 2'-deoxy-2'-fluoroadenosine-3'-phosphate
  modified_base 10: mod_base = OTHER; note = 2'-deoxy-2'-fluoroadenosine-3'-phosphate
  modified_base 11: mod_base = OTHER; note = 2'-deoxy-2'-fluorocytidine-3'-phosphate
  modified_base 12: mod_base = OTHER; note = 2'-O-methyluridine-3'-phosphate
  modified_base 13: mod_base = OTHER; note = 2'-O-methyluridine-3'-phosphate
  modified_base 14: mod_base = OTHER; note = 2'-O-methylguanosine-3'-phosphate
  modified_base 15: mod_base = OTHER; note = 2'-O-methyladenosine-3'-phosphate
  modified_base 16: mod_base = OTHER; note = 2'-O-methyladenosine-3'-phosphate
  modified_base 17: mod_base = OTHER; note = 2'-O-methyluridine-3'-phosphate
  modified_base 18: mod_base = OTHER; note = 2'-O-methyladenosine-3'-phosphate
  modified_base 19: mod_base = OTHER; note = 2'-O-methyluridine-3'-phosphate
  modified_base 20: mod_base = OTHER; note = 2'-O-methyluridine-3'-phosphate
  modified_base 21: mod_base = OTHER; note = 2'-O-methyladenosine-3'-phosphate ((2S,4R)-1-[29-[[2-(acetylamino)-2-deoxy-beta-D-galactopyra nosyl]oxy]-14,14-bis[[3-[[3-[[5-[[2-(acetylamino)-2-deoxy-b eta-D-galactopyranosyl]oxy]-1-oxopentyl]amino]propyl]amino] -3-oxopropoxy]methyl]-1,12,19,25-tetraoxo-16-oxa-13,20,24-t riazanonacos-1-yl]-4-hydroxy-2-pyrrolidinyl)methyl ester
ttcattcaaacttgaatatta

SEQ ID NO: 570 - RNA, 23 nt, synthetic construct
  source 1..23: mol_type = other RNA
  modified_base 1: mod_base = OTHER; note = 2'-O-methyluridine-3'-phosphorothioate
  modified_base 2: mod_base = OTHER; note = 2'-deoxy-2'-fluoroadenosine-3'-phosphorothioate
  modified_base 3: mod_base = OTHER; note = 2'-O-methyladenosine-3'-phosphate
  modified_base 4: mod_base = OTHER; note = 2'-O-methyluridine-3'-phosphate
  modified_base 5: mod_base = OTHER; note = 2'-O-methyladenosine-3'-phosphate
  modified_base 6: mod_base = OTHER; note = 2'-deoxy-2'-fluorouridine-3'-phosphate
  modified_base 7: mod_base = OTHER; note = 2'-O-methyluridine-3'-phosphate
  modified_base 8: mod_base = OTHER; note = 2'-deoxy-2'-fluorocytidine-3'-phosphate
  modified_base 9: mod_base = OTHER; note = 2'-deoxy-2'-fluoroadenosine-3'-phosphate
  modified_base 10: mod_base = OTHER; note = 2'-O-methyladenosine-3'-phosphate
  modified_base 11: mod_base = OTHER; note = 2'-O-methylguanosine-3'-phosphate
  modified_base 12: mod_base = OTHER; note = 2'-O-methyluridine-3'-phosphate
  modified_base 13: mod_base = OTHER; note = 2'-O-methyluridine-3'-phosphate
  modified_base 14: mod_base = OTHER; note = 2'-deoxy-2'-fluorouridine-3'-phosphate
  modified_base 15: mod_base = OTHER; note = 2'-O-methylguanosine-3'-phosphate
  modified_base 16: mod_base = OTHER; note = 2'-deoxy-2'-fluoroadenosine-3'-phosphate
  modified_base 17: mod_base = OTHER; note = 2'-O-methyladenosine-3'-phosphate
  modified_base 18: mod_base = OTHER; note = 2'-O-methyluridine-3'-phosphate
  modified_base 19: mod_base = OTHER; note = 2'-O-methylguanosine-3'-phosphate
  modified_base 20: mod_base = OTHER; note = 2'-O-methyladenosine-3'-phosphate
  modified_base 21: mod_base = OTHER; note = 2'-O-methyladenosine-3'-phosphorothioate
  modified_base 22: mod_base = OTHER; note = 2'-O-methyluridine-3'-phosphorothioate
  modified_base 23: mod_base = OTHER; note = 2'-O-methyladenosine
taatattcaagtttgaatgaata

SEQ ID NO: 571 - RNA, 23 nt, synthetic construct
  source 1..23: mol_type = other RNA
  modified_base 1: mod_base = OTHER; note = 5'-methyluridine-3'-phosphate
  modified_base 3: mod_base = OTHER; note = 5'-methyluridine-3'-phosphate
  modified_base 4: mod_base = OTHER; note = 5'-methyluridine-3'-phosphate
  modified_base 7: mod_base = OTHER; note = 5'-methyluridine-3'-phosphate
  modified_base 8: mod_base = OTHER; note = 5'-methyluridine-3'-phosphate
  modified_base 14: mod_base = OTHER; note = 5'-methyluridine-3'-phosphate
  modified_base 15: mod_base = OTHER; note = 5'-methyluridine-3'-phosphate
  modified_base 19: mod_base = OTHER; note = 5'-methyluridine-3'-phosphate
  modified_base 21: mod_base = OTHER; note = 5'-methyluridine-3'-phosphate
  modified_base 22: mod_base = OTHER; note = 5'-methyluridine-3'-phosphate
tattcattcaaacttgaatatta

SEQ ID NO: 572 - RNA, 21 nt, synthetic construct
  source 1..21: mol_type = other RNA
  modified_base 1: mod_base = OTHER; note = 2'-O-methylcytidine-3'-phosphorothioate
  modified_base 2: mod_base = OTHER; note = 2'-O-methyladenosine-3'-phosphorothioate
  modified_base 3: mod_base = OTHER; note = 2'-deoxy-2'-fluorouridine-3'-phosphate
  modified_base 4: mod_base = OTHER; note = 2'-O-methylguanosine-3'-phosphate
  modified_base 5: mod_base = OTHER; note = 2'-deoxy-2'-fluorouridine-3'-phosphate
  modified_base 6: mod_base = OTHER; note = 2'-O-methylguanosine-3'-phosphate
  modified_base 7: mod_base = OTHER; note = 2'-deoxy-2'-fluorocytidine-3'-phosphate
  modified_base 8: mod_base = OTHER; note = 2'-O-methyladenosine-3'-phosphate
  modified_base 9: mod_base = OTHER; note = 2'-deoxy-2'-fluorocytidine-3'-phosphate
  modified_base 10: mod_base = OTHER; note = 2'-deoxy-2'-fluoroadenosine-3'-phosphate
  modified_base 11: mod_base = OTHER; note = 2'-deoxy-2'-fluorouridine-3'-phosphate
  modified_base 12: mod_base = OTHER; note = 2'-O-methyluridine-3'-phosphate
  modified_base 13: mod_base = OTHER; note = 2'-deoxy-2'-fluoroguanosine-3'-phosphate
  modified_base 14: mod_base = OTHER; note = 2'-O-methyladenosine-3'-phosphate
  modified_base 15: mod_base = OTHER; note = 2'-deoxy-2'-fluoroadenosine-3'-phosphate
  modified_base 16: mod_base = OTHER; note = 2'-O-methyladenosine-3'-phosphate
  modified_base 17: mod_base = OTHER; note = 2'-deoxy-2'-fluoroadenosine-3'-phosphate
  modified_base 18: mod_base = OTHER; note = 2'-O-methylcytidine-3'-phosphate
  modified_base 19: mod_base = OTHER; note = 2'-deoxy-2'-fluorouridine-3'-phosphate
  modified_base 20: mod_base = OTHER; note = 2'-O-methylguanosine-3'-phosphate
  modified_base 21: mod_base = OTHER; note = 2'-O-methyluridine-3'-phosphate ((2S,4R)-1-[29-[[2-(acetylamino)-2-deoxy-beta-D-galactopyra nosyl]oxy]-14,14-bis[[3-[[3-[[5-[[2-(acetylamino)-2-deoxy-b eta-D-galactopyranosyl]oxy]-1-oxopentyl]amino]propyl]amino] -3-oxopropoxy]methyl]-1,12,19,25-tetraoxo-16-oxa-13,20,24-t riazanonacos-1-yl]-4-hydroxy-2-pyrrolidinyl)methyl ester
catgtgcacattgaaaactgt

SEQ ID NO: 573 - RNA, 23 nt, synthetic construct
  source 1..23: mol_type = other RNA
  modified_base 1: mod_base = OTHER; note = 2'-O-methyladenosine-3'-phosphorothioate
  modified_base 2: mod_base = OTHER; note = 2'-deoxy-2'-fluorocytidine-3'-phosphorothioate
  modified_base 3: mod_base = OTHER; note = 2'-O-methyladenosine-3'-phosphate
  modified_base 4: mod_base = OTHER; note = 2'-deoxy-2'-fluoroguanosine-3'-phosphate
  modified_base 5: mod_base = OTHER; note = 2'-O-methyluridine-3'-phosphate
  modified_base 6: mod_base = OTHER; note = 2'-deoxy-2'-fluorouridine-3'-phosphate
  modified_base 7: mod_base = OTHER; note = 2'-O-methyluridine-3'-phosphate
  modified_base 8: mod_base = OTHER; note = 2'-deoxy-2'-fluorouridine-3'-phosphate
  modified_base 9: mod_base = OTHER; note = 2'-O-methylcytidine-3'-phosphate
  modified_base 10: mod_base = OTHER; note = 2'-deoxy-2'-fluoroadenosine-3'-phosphate
  modified_base 11: mod_base = OTHER; note = 2'-O-methyladenosine-3'-phosphate
  modified_base 12: mod_base = OTHER; note = 2'-O-methyluridine-3'-phosphate
  modified_base 13: mod_base = OTHER; note = 2'-O-methylguanosine-3'-phosphate
  modified_base 14: mod_base = OTHER; note = 2'-deoxy-2'-fluorouridine-3'-phosphate
  modified_base 15: mod_base = OTHER; note = 2'-O-methylguanosine-3'-phosphate
  modified_base 16: mod_base = OTHER; note = 2'-deoxy-2'-fluorocytidine-3'-phosphate
  modified_base 17: mod_base = OTHER; note = 2'-O-methyladenosine-3'-phosphate
  modified_base 18: mod_base = OTHER; note = 2'-deoxy-2'-fluorocytidine-3'-phosphate
  modified_base 19: mod_base = OTHER; note = 2'-O-methyladenosine-3'-phosphate
  modified_base 20: mod_base = OTHER; note = 2'-deoxy-2'-fluorouridine-3'-phosphate
  modified_base 21: mod_base = OTHER; note = 2'-O-methylguanosine-3'-phosphorothioate
  modified_base 22: mod_base = OTHER; note = 2'-O-methylcytidine-3'-phosphorothioate
  modified_base 23: mod_base = OTHER; note = 2'-O-methylguanosine
acagttttcaatgtgcacatgcg

SEQ ID NO: 574 - RNA, 23 nt, synthetic construct
  source 1..23: mol_type = other RNA
  modified_base 5: mod_base = OTHER; note = 5'-methyluridine-3'-phosphate
  modified_base 7: mod_base = OTHER; note = 5'-methyluridine-3'-phosphate
  modified_base 13: mod_base = OTHER; note = 5'-methyluridine-3'-phosphate
  modified_base 14: mod_base = OTHER; note = 5'-methyluridine-3'-phosphate
  modified_base 21: mod_base = OTHER; note = 5'-methyluridine-3'-phosphate
  modified_base 23: mod_base = OTHER; note = 5'-methyluridine
cgcatgtgcacattgaaaactgt

SEQ ID NO: 575 - RNA, 21 nt, synthetic construct
  source 1..21: mol_type = other RNA
  modified_base 1: mod_base = OTHER; note = 2'-O-methyluridine-3'-phosphorothioate
  modified_base 2: mod_base = OTHER; note = 2'-O-methyluridine-3'-phosphorothioate
  modified_base 3: mod_base = OTHER; note = 2'-O-methylguanosine-3'-phosphate
  modified_base 4: mod_base = OTHER; note = 2'-O-methyluridine-3'-phosphate
  modified_base 5: mod_base = OTHER; note = 2'-O-methylguanosine-3'-phosphate
  modified_base 6: mod_base = OTHER; note = 2'-O-methyluridine-3'-phosphate
  modified_base 7: mod_base = OTHER; note = 2'-O-methylcytidine-3'-phosphate
  modified_base 8: mod_base = OTHER; note = 2'-O-methyladenosine-3'-phosphate
  modified_base 9: mod_base = OTHER; note = 2'-deoxy-2'-fluoroadenosine-3'-phosphate
  modified_base 10: mod_base = OTHER; note = 2'-O-methyladenosine-3'-phosphate
  modified_base 11: mod_base = OTHER; note = 2'-deoxy-2'-fluoroadenosine-3'-phosphate
  modified_base 12: mod_base = OTHER; note = 2'-O-methyluridine-3'-phosphate
  modified_base 13: mod_base = OTHER; note = 2'-O-methylguanosine-3'-phosphate
  modified_base 14: mod_base = OTHER; note = 2'-O-methyluridine-3'-phosphate
  modified_base 15: mod_base = OTHER; note = 2'-O-methyluridine-3'-phosphate
  modified_base 16: mod_base = OTHER; note = 2'-O-methylcytidine-3'-phosphate
  modified_base 17: mod_base = OTHER; note = 2'-O-methyluridine-3'-phosphate
  modified_base 18: mod_base = OTHER; note = 2'-O-methyladenosine-3'-phosphate
  modified_base 19: mod_base = OTHER; note = 2'-O-methylcytidine-3'-phosphate
  modified_base 20: mod_base = OTHER; note = 2'-O-methyladenosine-3'-phosphate
  modified_base 21: mod_base = OTHER; note = 2'-O-methyluridine-3'-phosphate ((2S,4R)-1-[29-[[2-(acetylamino)-2-deoxy-beta-D-galactopyra nosyl]oxy]-14,14-bis[[3-[[3-[[5-[[2-(acetylamino)-2-deoxy-b eta-D-galactopyranosyl]oxy]-1-oxopentyl]amino]propyl]amino] -3-oxopropoxy]methyl]-1,12,19,25-tetraoxo-16-oxa-13,20,24-t riazanonacos-1-yl]-4-hydroxy-2-pyrrolidinyl)methyl ester
ttgtgtcaaaatgttctacat

SEQ ID NO: 576 - RNA, 23 nt, synthetic construct
  source 1..23: mol_type = other RNA
  modified_base 1: mod_base = OTHER; note = 2'-O-methyladenosine-3'-phosphorothioate
  modified_base 2: mod_base = OTHER; note = 2'-deoxy-2'-fluorouridine-3'-phosphorothioate
  modified_base 3: mod_base = OTHER; note = 2'-O-methylguanosine-3'-phosphate
  modified_base 4: mod_base = OTHER; note = 2'-O-methyluridine-3'-phosphate
  modified_base 5: mod_base = OTHER; note = 2'-O-methyladenosine-3'-phosphate
  modified_base 6: mod_base = OTHER; note = 2'-O-methylguanosine-3'-phosphate
  modified_base 7: mod_base = OTHER; note = Adenosine-glycol nucleic acid (GNA), S-isomer
  modified_base 8: mod_base = OTHER; note = 2'-O-methyladenosine-3'-phosphate
  modified_base 9: mod_base = OTHER; note = 2'-O-methylcytidine-3'-phosphate
  modified_base 10: mod_base = OTHER; note = 2'-O-methyladenosine-3'-phosphate
  modified_base 11: mod_base = OTHER; note = 2'-O-methyluridine-3'-phosphate
  modified_base 12: mod_base = OTHER; note = 2'-deoxy-2'-fluorouridine-3'-phosphate
  modified_base 13: mod_base = OTHER; note = 2'-O-methyluridine-3'-phosphate
  modified_base 14: mod_base = OTHER; note = 2'-deoxy-2'-fluorouridine-3'-phosphate
  modified_base 15: mod_base = OTHER; note = 2'-O-methylguanosine-3'-phosphate
  modified_base 16: mod_base = OTHER; note = 2'-deoxy-2'-fluoroadenosine-3'-phosphate
  modified_base 17: mod_base = OTHER; note = 2'-O-methylcytidine-3'-phosphate
  modified_base 18: mod_base = OTHER; note = 2'-O-methyladenosine-3'-phosphate
  modified_base 19: mod_base = OTHER; note = 2'-O-methylcytidine-3'-phosphate
  modified_base 20: mod_base = OTHER; note = 2'-O-methyladenosine-3'-phosphate
  modified_base 21: mod_base = OTHER; note = 2'-O-methyladenosine-3'-phosphorothioate
  modified_base 22: mod_base = OTHER; note = 2'-O-methyladenosine-3'-phosphorothioate
  modified_base 23: mod_base = OTHER; note = 2'-O-methyladenosine
atgtagaacattttgacacaaaa

SEQ ID NO: 577 - RNA, 23 nt, synthetic construct
  source 1..23: mol_type = other RNA
  modified_base 1: mod_base = OTHER; note = 5'-methyluridine-3'-phosphate
  modified_base 2: mod_base = OTHER; note = 5'-methyluridine-3'-phosphate
  modified_base 3: mod_base = OTHER; note = 5'-methyluridine-3'-phosphate
  modified_base 4: mod_base = OTHER; note = 5'-methyluridine-3'-phosphate
  modified_base 6: mod_base = OTHER; note = 5'-methyluridine-3'-phosphate
  modified_base 8: mod_base = OTHER; note = 5'-methyluridine-3'-phosphate
  modified_base 14: mod_base = OTHER; note = 5'-methyluridine-3'-phosphate
  modified_base 16: mod_base = OTHER; note = 5'-methyluridine-3'-phosphate
  modified_base 17: mod_base = OTHER; note = 5'-methyluridine-3'-phosphate
  modified_base 19: mod_base = OTHER; note = 5'-methyluridine-3'-phosphate
  modified_base 23: mod_base = OTHER; note = 5'-methyluridine
ttttgtgtcaaaatgttctacat

SEQ ID NO: 578 - RNA, 21 nt, synthetic construct
  source 1..21: mol_type = other RNA
  modified_base 1: mod_base = OTHER; note = 2'-O-methyluridine-3'-phosphorothioate
  modified_base 2: mod_base = OTHER; note = 2'-O-methyluridine-3'-phosphorothioate
  modified_base 3: mod_base = OTHER; note = 2'-O-methylguanosine-3'-phosphate
  modified_base 4: mod_base = OTHER; note = 2'-O-methyluridine-3'-phosphate
  modified_base 5: mod_base = OTHER; note = 2'-O-methylguanosine-3'-phosphate
  modified_base 6: mod_base = OTHER; note = 2'-O-methyluridine-3'-phosphate
  modified_base 7: mod_base = OTHER; note = 2'-deoxy-2'-fluorocytidine-3'-phosphate
  modified_base 8: mod_base = OTHER; note = 2'-O-methyladenosine-3'-phosphate
  modified_base 9: mod_base = OTHER; note = 2'-deoxy-2'-fluoroadenosine-3'-phosphate
  modified_base 10: mod_base = OTHER; note = 2'-deoxy-2'-fluoroadenosine-3'-phosphate
  modified_base 11: mod_base = OTHER; note = 2'-deoxy-2'-fluoroadenosine-3'-phosphate
  modified_base 12: mod_base = OTHER; note = 2'-O-methyluridine-3'-phosphate
  modified_base 13: mod_base = OTHER; note = 2'-O-methylguanosine-3'-phosphate
  modified_base 14: mod_base = OTHER; note = 2'-O-methyluridine-3'-phosphate
  modified_base 15: mod_base = OTHER; note = 2'-O-methyluridine-3'-phosphate
  modified_base 16: mod_base = OTHER; note = 2'-O-methylcytidine-3'-phosphate
  modified_base 17: mod_base = OTHER; note = 2'-O-methyluridine-3'-phosphate
  modified_base 18: mod_base = OTHER; note = 2'-O-methyladenosine-3'-phosphate
  modified_base 19: mod_base = OTHER; note = 2'-O-methylcytidine-3'-phosphate
  modified_base 20: mod_base = OTHER; note = 2'-O-methyladenosine-3'-phosphate
  modified_base 21: mod_base = OTHER; note = 2'-O-methyluridine-3'-phosphate ((2S,4R)-1-[29-[[2-(acetylamino)-2-deoxy-beta-D-galactopyra nosyl]oxy]-14,14-bis[[3-[[3-[[5-[[2-(acetylamino)-2-deoxy-b eta-D-galactopyranosyl]oxy]-1-oxopentyl]amino]propyl]amino] -3-oxopropoxy]methyl]-1,12,19,25-tetraoxo-16-oxa-13,20,24-t riazanonacos-1-yl]-4-hydroxy-2-pyrrolidinyl)methyl ester
ttgtgtcaaaatgttctacat

SEQ ID NO: 579 - RNA, 23 nt, synthetic construct
  source 1..23: mol_type = other RNA
  modified_base 1: mod_base = OTHER; note = 2'-O-methyladenosine-3'-phosphorothioate
  modified_base 2: mod_base = OTHER; note = 2'-deoxy-2'-fluorouridine-3'-phosphorothioate
  modified_base 3: mod_base = OTHER; note = 2'-O-methylguanosine-3'-phosphate
  modified_base 4: mod_base = OTHER; note = 2'-O-methyluridine-3'-phosphate
  modified_base 5: mod_base = OTHER; note = 2'-O-methyladenosine-3'-phosphate
  modified_base 6: mod_base = OTHER; note = 2'-deoxy-2'-fluoroguanosine-3'-phosphate
  modified_base 7: mod_base = OTHER; note = 2'-O-methyladenosine-3'-phosphate
  modified_base 8: mod_base = OTHER; note = 2'-deoxy-2'-fluoroadenosine-3'-phosphate
  modified_base 9: mod_base = OTHER; note = 2'-deoxy-2'-fluorocytidine-3'-phosphate
  modified_base 10: mod_base = OTHER; note = 2'-O-methyladenosine-3'-phosphate
  modified_base 11: mod_base = OTHER; note = 2'-O-methyluridine-3'-phosphate
  modified_base 12: mod_base = OTHER; note = 2'-O-methyluridine-3'-phosphate
  modified_base 13: mod_base = OTHER; note = 2'-O-methyluridine-3'-phosphate
  modified_base 14: mod_base = OTHER; note = 2'-deoxy-2'-fluorouridine-3'-phosphate
  modified_base 15: mod_base = OTHER; note = 2'-O-methylguanosine-3'-phosphate
  modified_base 16: mod_base = OTHER; note = 2'-deoxy-2'-fluoroadenosine-3'-phosphate
  modified_base 17: mod_base = OTHER; note = 2'-O-methylcytidine-3'-phosphate
  modified_base 18: mod_base = OTHER; note = 2'-O-methyladenosine-3'-phosphate
  modified_base 19: mod_base = OTHER; note = 2'-O-methylcytidine-3'-phosphate
  modified_base 20: mod_base = OTHER; note = 2'-O-methyladenosine-3'-phosphate
  modified_base 21: mod_base = OTHER; note = 2'-O-methyladenosine-3'-phosphorothioate
  modified_base 22: mod_base = OTHER; note = 2'-O-methyladenosine-3'-phosphorothioate
  modified_base 23: mod_base = OTHER; note = 2'-O-methyladenosine
atgtagaacattttgacacaaaa

SEQ ID NO: 580 - RNA, 23 nt, synthetic construct
  source 1..23: mol_type = other RNA
  modified_base 1: mod_base = OTHER; note = 5'-methyluridine-3'-phosphate
  modified_base 2: mod_base = OTHER; note = 5'-methyluridine-3'-phosphate
  modified_base 3: mod_base = OTHER; note = 5'-methyluridine-3'-phosphate
  modified_base 4: mod_base = OTHER; note = 5'-methyluridine-3'-phosphate
  modified_base 6: mod_base = OTHER; note = 5'-methyluridine-3'-phosphate
  modified_base 8: mod_base = OTHER; note = 5'-methyluridine-3'-phosphate
  modified_base 14: mod_base = OTHER; note = 5'-methyluridine-3'-phosphate
  modified_base 16: mod_base = OTHER; note = 5'-methyluridine-3'-phosphate
  modified_base 17: mod_base = OTHER; note = 5'-methyluridine-3'-phosphate
  modified_base 19: mod_base = OTHER; note = 5'-methyluridine-3'-phosphate
  modified_base 23: mod_base = OTHER; note = 5'-methyluridine
ttttgtgtcaaaatgttctacat

SEQ ID NO: 581 - RNA, 21 nt, synthetic construct
  source 1..21: mol_type = other RNA
  modified_base 1: mod_base = OTHER; note = 2'-O-methylcytidine-3'-phosphorothioate
  modified_base 2: mod_base = OTHER; note = 2'-O-methyladenosine-3'-phosphorothioate
  modified_base 3: mod_base = OTHER; note = 2'-deoxy-2'-fluorouridine-3'-phosphate
  modified_base 4: mod_base = OTHER; note = 2'-O-methylguanosine-3'-phosphate
  modified_base 5: mod_base = OTHER; note = 2'-deoxy-2'-fluorouridine-3'-phosphate
  modified_base 6: mod_base = OTHER; note = 2'-O-methylguanosine-3'-phosphate
  modified_base 7: mod_base = OTHER; note = 2'-deoxy-2'-fluorocytidine-3'-phosphate
  modified_base 8: mod_base = OTHER; note = 2'-O-methyladenosine-3'-phosphate
  modified_base 9: mod_base = OTHER; note = 2'-deoxy-2'-fluorocytidine-3'-phosphate
  modified_base 10: mod_base = OTHER; note = 2'-deoxy-2'-fluoroadenosine-3'-phosphate
  modified_base 11: mod_base = OTHER; note = 2'-deoxy-2'-fluorouridine-3'-phosphate
  modified_base 12: mod_base = OTHER; note = 2'-O-methyluridine-3'-phosphate
  modified_base 13: mod_base = OTHER; note = 2'-deoxy-2'-fluoroguanosine-3'-phosphate
  modified_base 14: mod_base = OTHER; note = 2'-O-methyladenosine-3'-phosphate
  modified_base 15: mod_base = OTHER; note = 2'-deoxy-2'-fluoroadenosine-3'-phosphate
  modified_base 16: mod_base = OTHER; note = 2'-O-methyladenosine-3'-phosphate
  modified_base 17: mod_base = OTHER; note = 2'-deoxy-2'-fluoroadenosine-3'-phosphate
  modified_base 18: mod_base = OTHER; note = 2'-O-methylcytidine-3'-phosphate
  modified_base 19: mod_base = OTHER; note = 2'-deoxy-2'-fluorouridine-3'-phosphate
  modified_base 20: mod_base = OTHER; note = 2'-O-methylguanosine-3'-phosphate
  modified_base 21: mod_base = OTHER; note = 2'-O-methyluridine-3'-phosphate ((2S,4R)-1-[29-[[2-(acetylamino)-2-deoxy-beta-D-galactopyra nosyl]oxy]-14,14-bis[[3-[[3-[[5-[[2-(acetylamino)-2-deoxy-b eta-D-galactopyranosyl]oxy]-1-oxopentyl]amino]propyl]amino] -3-oxopropoxy]methyl]-1,12,19,25-tetraoxo-16-oxa-13,20,24-t riazanonacos-1-yl]-4-hydroxy-2-pyrrolidinyl)methyl ester
catgtgcacattgaaaactgt

SEQ ID NO: 582 - RNA, 23 nt, synthetic construct
  source 1..23: mol_type = other RNA
  modified_base 1: mod_base = OTHER; note = 2'-O-methyladenosine-3'-phosphorothioate
  modified_base 2: mod_base = OTHER; note = 2'-deoxy-2'-fluorocytidine-3'-phosphorothioate
  modified_base 3: mod_base = OTHER; note = 2'-O-methyladenosine-3'-phosphate
  modified_base 4: mod_base = OTHER; note = 2'-O-methylguanosine-3'-phosphate
  modified_base 5: mod_base = OTHER; note = 2'-O-methyluridine-3'-phosphate
  modified_base 6: mod_base = OTHER; note = 2'-deoxy-2'-fluorouridine-3'-phosphate
  modified_base 7: mod_base = OTHER; note = 2'-O-methyluridine-3'-phosphate
  modified_base 8: mod_base = OTHER; note = 2'-deoxy-2'-fluorouridine-3'-phosphate
  modified_base 9: mod_base = OTHER; note = 2'-deoxy-2'-fluorocytidine-3'-phosphate
  modified_base 10: mod_base = OTHER; note = 2'-O-methyladenosine-3'-phosphate
  modified_base 11: mod_base = OTHER; note = 2'-O-methyladenosine-3'-phosphate
  modified_base 12: mod_base = OTHER; note = 2'-O-methyluridine-3'-phosphate
  modified_base 13: mod_base = OTHER; note = 2'-O-methylguanosine-3'-phosphate
  modified_base 14: mod_base = OTHER; note = 2'-deoxy-2'-fluorouridine-3'-phosphate
  modified_base 15: mod_base = OTHER; note = 2'-O-methylguanosine-3'-phosphate
  modified_base 16: mod_base = OTHER; note = 2'-deoxy-2'-fluorocytidine-3'-phosphate
  modified_base 17: mod_base = OTHER; note = 2'-O-methyladenosine-3'-phosphate
  modified_base 18: mod_base = OTHER; note = 2'-O-methylcytidine-3'-phosphate
  modified_base 19: mod_base = OTHER; note = 2'-O-methyladenosine-3'-phosphate
  modified_base 20: mod_base = OTHER; note = 2'-O-methyluridine-3'-phosphate
  modified_base 21: mod_base = OTHER; note = 2'-O-methylguanosine-3'-phosphorothioate
  modified_base 22: mod_base = OTHER; note = 2'-O-methylcytidine-3'-phosphorothioate
  modified_base 23: mod_base = OTHER; note = 2'-O-methylguanosine
acagttttcaatgtgcacatgcg

SEQ ID NO: 583 - RNA, 23 nt, synthetic construct
  source 1..23: mol_type = other RNA
  modified_base 5: mod_base = OTHER; note = 5'-methyluridine-3'-phosphate
  modified_base 7: mod_base = OTHER; note = 5'-methyluridine-3'-phosphate
  modified_base 13: mod_base = OTHER; note = 5'-methyluridine-3'-phosphate
  modified_base 14: mod_base = OTHER; note = 5'-methyluridine-3'-phosphate
  modified_base 21: mod_base = OTHER; note = 5'-methyluridine-3'-phosphate
  modified_base 23: mod_base = OTHER; note = 5'-methyluridine
cgcatgtgcacattgaaaactgt

SEQ ID NO: 584 - RNA, 21 nt, synthetic construct
  source 1..21: mol_type = other RNA
  modified_base 1: mod_base = OTHER; note = 2'-O-methyluridine-3'-phosphorothioate
  modified_base 2: mod_base = OTHER; note = 2'-O-methylguanosine-3'-phosphorothioate
  modified_base 3: mod_base = OTHER; note = 2'-O-methyluridine-3'-phosphate
  modified_base 4: mod_base = OTHER; note = 2'-O-methylguanosine-3'-phosphate
  modified_base 5: mod_base = OTHER; note = 2'-O-methyluridine-3'-phosphate
  modified_base 6: mod_base = OTHER; note = 2'-O-methylcytidine-3'-phosphate
  modified_base 7: mod_base = OTHER; note = 2'-deoxy-2'-fluoroadenosine-3'-phosphate
  modified_base 8: mod_base = OTHER; note = 2'-O-methyladenosine-3'-phosphate
  modified_base 9: mod_base = OTHER; note = 2'-deoxy-2'-fluoroadenosine-3'-phosphate
  modified_base 10: mod_base = OTHER; note = 2'-deoxy-2'-fluoroadenosine-3'-phosphate
  modified_base 11: mod_base = OTHER; note = 2'-deoxy-2'-fluorouridine-3'-phosphate
  modified_base 12: mod_base = OTHER; note = 2'-O-methylguanosine-3'-phosphate
  modified_base 13: mod_base = OTHER; note = 2'-O-methyluridine-3'-phosphate
  modified_base 14: mod_base = OTHER; note = 2'-O-methyluridine-3'-phosphate
  modified_base 15: mod_base = OTHER; note = 2'-O-methylcytidine-3'-phosphate
  modified_base 16: mod_base = OTHER; note = 2'-O-methyluridine-3'-phosphate
  modified_base 17: mod_base = OTHER; note = 2'-O-methyladenosine-3'-phosphate
  modified_base 18: mod_base = OTHER; note = 2'-O-methylcytidine-3'-phosphate
  modified_base 19: mod_base = OTHER; note = 2'-O-methyladenosine-3'-phosphate
  modified_base 20: mod_base = OTHER; note = 2'-O-methyluridine-3'-phosphate
  modified_base 21: mod_base = OTHER; note = 2'-O-methyluridine-3'-phosphate ((2S,4R)-1-[29-[[2-(acetylamino)-2-deoxy-beta-D-galactopyra nosyl]oxy]-14,14-bis[[3-[[3-[[5-[[2-(acetylamino)-2-deoxy-b eta-D-galactopyranosyl]oxy]-1-oxopentyl]amino]propyl]amino] -3-oxopropoxy]methyl]-1,12,19,25-tetraoxo-16-oxa-13,20,24-t riazanonacos-1-yl]-4-hydroxy-2-pyrrolidinyl)methyl ester
tgtgtcaaaatgttctacatt

SEQ ID NO: 585 - RNA, 23 nt, synthetic construct
  source 1..23: mol_type = other RNA
  modified_base 1: mod_base = OTHER; note = 2'-O-methyladenosine-3'-phosphorothioate
  modified_base 2: mod_base = OTHER; note = 2'-deoxy-2'-fluoroadenosine-3'-phosphorothioate
  modified_base 3: mod_base = OTHER; note = 2'-O-methyluridine-3'-phosphate
  modified_base 4: mod_base = OTHER; note = 2'-O-methylguanosine-3'-phosphate
  modified_base 5: mod_base = OTHER; note = 2'-O-methyluridine-3'-phosphate
  modified_base 6: mod_base = OTHER; note = 2'-deoxy-2'-fluoroadenosine-3'-phosphate
  modified_base 7: mod_base = OTHER; note = 2'-O-methylguanosine-3'-phosphate
  modified_base 8: mod_base = OTHER; note = 2'-deoxy-2'-fluoroadenosine-3'-phosphate
  modified_base 9: mod_base = OTHER; note = 2'-deoxy-2'-fluoroadenosine-3'-phosphate
  modified_base 10: mod_base = OTHER; note = 2'-O-methylcytidine-3'-phosphate
  modified_base 11: mod_base = OTHER; note = 2'-O-methyladenosine-3'-phosphate
  modified_base 12: mod_base = OTHER; note = 2'-O-methyluridine-3'-phosphate
  modified_base 13: mod_base = OTHER; note = 2'-O-methyluridine-3'-phosphate
  modified_base 14: mod_base = OTHER; note = 2'-deoxy-2'-fluorouridine-3'-phosphate
  modified_base 15: mod_base = OTHER; note = 2'-O-methyluridine-3'-phosphate
  modified_base 16: mod_base = OTHER; note = 2'-deoxy-2'-fluoroguanosine-3'-phosphate
  modified_base 17: mod_base = OTHER; note = 2'-O-methyladenosine-3'-phosphate
  modified_base 18: mod_base = OTHER; note = 2'-O-methylcytidine-3'-phosphate
  modified_base 19: mod_base = OTHER; note = 2'-O-methyladenosine-3'-phosphate
  modified_base 20: mod_base = OTHER; note = 2'-O-methylcytidine-3'-phosphate
  modified_base 21: mod_base = OTHER; note = 2'-O-methyladenosine-3'-phosphorothioate
  modified_base 22: mod_base = OTHER; note = 2'-O-methyladenosine-3'-phosphorothioate
  modified_base 23: mod_base = OTHER; note = 2'-O-methyladenosine
aatgtagaacattttgacacaaa

SEQ ID NO: 586 - RNA, 23 nt, synthetic construct
  source 1..23: mol_type = other RNA
  modified_base 1: mod_base = OTHER; note = 5'-methyluridine-3'-phosphate
  modified_base 2: mod_base = OTHER; note = 5'-methyluridine-3'-phosphate
  modified_base 3: mod_base = OTHER; note = 5'-methyluridine-3'-phosphate
  modified_base 5: mod_base = OTHER; note = 5'-methyluridine-3'-phosphate
  modified_base 7: mod_base = OTHER; note = 5'-methyluridine-3'-phosphate
  modified_base 13: mod_base = OTHER; note = 5'-methyluridine-3'-phosphate
  modified_base 15: mod_base = OTHER; note = 5'-methyluridine-3'-phosphate
  modified_base 16: mod_base = OTHER; note = 5'-methyluridine-3'-phosphate
  modified_base 18: mod_base = OTHER; note = 5'-methyluridine-3'-phosphate
  modified_base 22: mod_base = OTHER; note = 5'-methyluridine-3'-phosphate
  modified_base 23: mod_base = OTHER; note = 5'-methyluridine
tttgtgtcaaaatgttctacatt

SEQ ID NO: 587 - RNA, 21 nt, synthetic construct
  source 1..21: mol_type = other RNA
  modified_base 1: mod_base = OTHER; note = 2'-O-methylcytidine-3'-phosphorothioate
  modified_base 2: mod_base = OTHER; note = 2'-O-methyladenosine-3'-phosphorothioate
  modified_base 3: mod_base = OTHER; note = 2'-deoxy-2'-fluorouridine-3'-phosphate
  modified_base 4: mod_base = OTHER; note = 2'-O-methylguanosine-3'-phosphate
  modified_base 5: mod_base = OTHER; note = 2'-deoxy-2'-fluorouridine-3'-phosphate
  modified_base 6: mod_base = OTHER; note = 2'-O-methylguanosine-3'-phosphate
  modified_base 7: mod_base = OTHER; note = 2'-deoxy-2'-fluorocytidine-3'-phosphate
  modified_base 8: mod_base = OTHER; note = 2'-O-methyladenosine-3'-phosphate
  modified_base 9: mod_base = OTHER; note = 2'-deoxy-2'-fluorocytidine-3'-phosphate
  modified_base 10: mod_base = OTHER; note = 2'-deoxy-2'-fluoroadenosine-3'-phosphate
  modified_base 11: mod_base = OTHER; note = 2'-deoxy-2'-fluorouridine-3'-phosphate
  modified_base 12: mod_base = OTHER; note = 2'-O-methyluridine-3'-phosphate
  modified_base 13: mod_base = OTHER; note = 2'-deoxy-2'-fluoroguanosine-3'-phosphate
  modified_base 14: mod_base = OTHER; note = 2'-O-methyladenosine-3'-phosphate
  modified_base 15: mod_base = OTHER; note = 2'-deoxy-2'-fluoroadenosine-3'-phosphate
  modified_base 16: mod_base = OTHER; note = 2'-O-methyladenosine-3'-phosphate
  modified_base 17: mod_base = OTHER; note = 2'-deoxy-2'-fluoroadenosine-3'-phosphate
  modified_base 18: mod_base = OTHER; note = 2'-O-methylcytidine-3'-phosphate
  modified_base 19: mod_base = OTHER; note = 2'-deoxy-2'-fluorouridine-3'-phosphate
  modified_base 20: mod_base = OTHER; note = 2'-O-methylguanosine-3'-phosphate
  modified_base 21: mod_base = OTHER; note = 2'-O-methyluridine-3'-phosphate ((2S,4R)-1-[29-[[2-(acetylamino)-2-deoxy-beta-D-galactopyra nosyl]oxy]-14,14-bis[[3-[[3-[[5-[[2-(acetylamino)-2-deoxy-b eta-D-galactopyranosyl]oxy]-1-oxopentyl]amino]propyl]amino] -3-oxopropoxy]methyl]-1,12,19,25-tetraoxo-16-oxa-13,20,24-t riazanonacos-1-yl]-4-hydroxy-2-pyrrolidinyl)methyl ester
catgtgcacattgaaaactgt

SEQ ID NO: 588 - RNA, 23 nt, synthetic construct
  source 1..23: mol_type = other RNA
  modified_base 1: mod_base = OTHER; note = 2'-O-methyladenosine-3'-phosphorothioate
  modified_base 2: mod_base = OTHER; note = 2'-deoxy-2'-fluorocytidine-3'-phosphorothioate
  modified_base 3: mod_base = OTHER; note = 2'-O-methyladenosine-3'-phosphate
  modified_base 4: mod_base = OTHER; note = 2'-O-methylguanosine-3'-phosphate
  modified_base 5: mod_base = OTHER; note = 2'-O-methyluridine-3'-phosphate
  modified_base 6: mod_base = OTHER; note = 2'-deoxy-2'-fluorouridine-3'-phosphate
  modified_base 7: mod_base = OTHER; note = 2'-O-methyluridine-3'-phosphate
  modified_base 8: mod_base = OTHER; note = 2'-deoxy-2'-fluorouridine-3'-phosphate
  modified_base 9: mod_base = OTHER; note = 2'-deoxy-2'-fluorocytidine-3'-phosphate
  modified_base 10: mod_base = OTHER; note = 2'-O-methyladenosine-3'-phosphate
  modified_base 11: mod_base = OTHER; note = 2'-O-methyladenosine-3'-phosphate
  modified_base 12: mod_base = OTHER; note = 2'-O-methyluridine-3'-phosphate
  modified_base 13: mod_base = OTHER; note = 2'-O-methylguanosine-3'-phosphate
  modified_base 14: mod_base = OTHER; note = 2'-deoxy-2'-fluorouridine-3'-phosphate
  modified_base 15: mod_base = OTHER; note = 2'-O-methylguanosine-3'-phosphate
  modified_base 16: mod_base = OTHER; note = 2'-deoxy-2'-fluorocytidine-3'-phosphate
  modified_base 17: mod_base = OTHER; note = 2'-O-methyladenosine-3'-phosphate
  modified_base 18: mod_base = OTHER; note = 2'-O-methylcytidine-3'-phosphate
  modified_base 19: mod_base = OTHER; note = 2'-O-methyladenosine-3'-phosphate
  modified_base 20: mod_base = OTHER; note = 2'-O-methyluridine-3'-phosphate
  modified_base 21: mod_base = OTHER; note = 2'-O-methylguanosine-3'-phosphorothioate
  modified_base 22: mod_base = OTHER; note = 2'-O-methylcytidine-3'-phosphorothioate
  modified_base 23: mod_base = OTHER; note = 2'-O-methylguanosine
acagttttcaatgtgcacatgcg

SEQ ID NO: 589 - RNA, 23 nt, synthetic construct
  source 1..23: mol_type = other RNA
  modified_base 5: mod_base = OTHER; note = 5'-methyluridine-3'-phosphate
  modified_base 7: mod_base = OTHER; note = 5'-methyluridine-3'-phosphate
  modified_base 13: mod_base = OTHER; note = 5'-methyluridine-3'-phosphate
  modified_base 14: mod_base = OTHER; note = 5'-methyluridine-3'-phosphate
  modified_base 21: mod_base = OTHER; note = 5'-methyluridine-3'-phosphate
  modified_base 23: mod_base = OTHER; note = 5'-methyluridine
cgcatgtgcacattgaaaactgt

SEQ ID NO: 590 - RNA, 21 nt, synthetic construct
  source 1..21: mol_type = other RNA
  modified_base 1: mod_base = OTHER; note = 2'-O-methylcytidine-3'-phosphorothioate
  modified_base 2: mod_base = OTHER; note = 2'-O-methyladenosine-3'-phosphorothioate
  modified_base 3: mod_base = OTHER; note = 2'-O-methyluridine-3'-phosphate
  modified_base 4: mod_base = OTHER; note = 2'-O-methylguanosine-3'-phosphate
  modified_base 5: mod_base = OTHER; note = 2'-O-hexadecyl-uridine-3'-phosphate
  modified_base 6: mod_base = OTHER; note = 2'-O-methylguanosine-3'-phosphate
  modified_base 7: mod_base = OTHER; note = 2'-deoxy-2'-fluorocytidine-3'-phosphate
  modified_base 8: mod_base = OTHER; note = 2'-O-methyladenosine-3'-phosphate
  modified_base 9: mod_base = OTHER; note = 2'-deoxy-2'-fluorocytidine-3'-phosphate
  modified_base 10: mod_base = OTHER; note = 2'-deoxy-2'-fluoroadenosine-3'-phosphate
  modified_base 11: mod_base = OTHER; note = 2'-deoxy-2'-fluorouridine-3'-phosphate
  modified_base 12: mod_base = OTHER; note = 2'-O-methyluridine-3'-phosphate
  modified_base 13: mod_base = OTHER; note = 2'-O-methylguanosine-3'-phosphate
  modified_base 14: mod_base = OTHER; note = 2'-O-methyladenosine-3'-phosphate
  modified_base 15: mod_base = OTHER; note = 2'-O-methyladenosine-3'-phosphate
  modified_base 16: mod_base = OTHER; note = 2'-O-methyladenosine-3'-phosphate
  modified_base 17: mod_base = OTHER; note = 2'-O-methyladenosine-3'-phosphate
  modified_base 18: mod_base = OTHER; note = 2'-O-methylcytidine-3'-phosphate
  modified_base 19: mod_base = OTHER; note = 2'-O-methyluridine-3'-phosphate
  modified_base 20: mod_base = OTHER; note = 2'-O-methylguanosine-3'-phosphate
  modified_base 21: mod_base = OTHER; note = 2'-O-methyluridine-3'-phosphate ((2S,4R)-1-[29-[[2-(acetylamino)-2-deoxy-beta-D-galactopyra nosyl]oxy]-14,14-bis[[3-[[3-[[5-[[2-(acetylamino)-2-deoxy-b eta-D-galactopyranosyl]oxy]-1-oxopentyl]amino]propyl]amino] -3-oxopropoxy]methyl]-1,12,19,25-tetraoxo-16-oxa-13,20,24-t riazanonacos-1-yl]-4-hydroxy-2-pyrrolidinyl)methyl ester
catgtgcacattgaaaactgt

SEQ ID NO: 591 - RNA, 23 nt, synthetic construct
  source 1..23: mol_type = other RNA
  modified_base 1: mod_base = OTHER; note = 2'-O-methyladenosine-3'-phosphorothioate
  modified_base 2: mod_base = OTHER; note = 2'-deoxy-2'-fluorocytidine-3'-phosphorothioate
  modified_base 3: mod_base = OTHER; note = 2'-O-methyladenosine-3'-phosphate
  modified_base 4: mod_base = OTHER; note = 2'-O-methylguanosine-3'-phosphate
  modified_base 5: mod_base = OTHER; note = 2'-O-methyluridine-3'-phosphate
  modified_base 6: mod_base = OTHER; note = 2'-deoxy-2'-fluorouridine-3'-phosphate
  modified_base 7: mod_base = OTHER; note = 2'-O-methyluridine-3'-phosphate
  modified_base 8: mod_base = OTHER; note = 2'-deoxy-2'-fluorouridine-3'-phosphate
  modified_base 9: mod_base = OTHER; note = 2'-deoxy-2'-fluorocytidine-3'-phosphate
  modified_base 10: mod_base = OTHER; note = 2'-O-methyladenosine-3'-phosphate
  modified_base 11: mod_base = OTHER; note = 2'-O-methyladenosine-3'-phosphate
  modified_base 12: mod_base = OTHER; note = 2'-O-methyluridine-3'-phosphate
  modified_base 13: mod_base = OTHER; note = 2'-O-methylguanosine-3'-phosphate
  modified_base 14: mod_base = OTHER; note = 2'-deoxy-2'-fluorouridine-3'-phosphate
  modified_base 15: mod_base = OTHER; note = 2'-O-methylguanosine-3'-phosphate
  modified_base 16: mod_base = OTHER; note = 2'-deoxy-2'-fluorocytidine-3'-phosphate
  modified_base 17: mod_base = OTHER; note = 2'-O-methyladenosine-3'-phosphate
  modified_base 18: mod_base = OTHER; note = 2'-O-methylcytidine-3'-phosphate
  modified_base 19: mod_base = OTHER; note = 2'-O-methyladenosine-3'-phosphate
  modified_base 20: mod_base = OTHER; note = 2'-O-methyluridine-3'-phosphate
  modified_base 21: mod_base = OTHER; note = 2'-O-methylguanosine-3'-phosphorothioate
  modified_base 22: mod_base = OTHER; note = 2'-O-methylcytidine-3'-phosphorothioate
  modified_base 23: mod_base = OTHER; note = 2'-O-methylguanosine
acagttttcaatgtgcacatgcg

SEQ ID NO: 592 - RNA, 23 nt, synthetic construct
  source 1..23: mol_type = other RNA
  modified_base 5: mod_base = OTHER; note = 5'-methyluridine-3'-phosphate
  modified_base 7: mod_base = OTHER; note = 5'-methyluridine-3'-phosphate
  modified_base 13: mod_base = OTHER; note = 5'-methyluridine-3'-phosphate
  modified_base 14: mod_base = OTHER; note = 5'-methyluridine-3'-phosphate
  modified_base 21: mod_base = OTHER; note = 5'-methyluridine-3'-phosphate
  modified_base 23: mod_base = OTHER; note = 5'-methyluridine
cgcatgtgcacattgaaaactgt

SEQ ID NO: 593 - RNA, 21 nt, synthetic construct
  source 1..21: mol_type = other RNA
  modified_base 1: mod_base = OTHER; note = 2'-O-methyladenosine-3'-phosphorothioate
  modified_base 2: mod_base = OTHER; note = 2'-O-methyluridine-3'-phosphorothioate
  modified_base 3: mod_base = OTHER; note = 2'-O-methylguanosine-3'-phosphate
  modified_base 4: mod_base = OTHER; note = 2'-O-methylguanosine-3'-phosphate
  modified_base 5: mod_base = OTHER; note = 2'-O-methyluridine-3'-phosphate
  modified_base 6: mod_base = OTHER; note = 2'-deoxy-2'-fluorocytidine-3'-phosphate
  modified_base 7: mod_base = OTHER; note = 2'-deoxy-2'-fluoroadenosine-3'-phosphate
  modified_base 8: mod_base = OTHER; note = 2'-O-methylguanosine-3'-phosphate
  modified_base 9: mod_base = OTHER; note = 2'-deoxy-2'-fluoroadenosine-3'-phosphate
  modified_base 10: mod_base = OTHER; note = 2'-O-methyluridine-3'-phosphate
  modified_base 11: mod_base = OTHER; note = 2'-deoxy-2'-fluorocytidine-3'-phosphate
  modified_base 12: mod_base = OTHER; note = 2'-deoxy-2'-fluorouridine-3'-phosphate
  modified_base 13: mod_base = OTHER; note = 2'-O-methyluridine-3'-phosphate
  modified_base 14: mod_base = OTHER; note = 2'-O-methylcytidine-3'-phosphate
  modified_base 15: mod_base = OTHER; note = 2'-O-methyladenosine-3'-phosphate
  modified_base 16: mod_base = OTHER; note = 2'-O-methyladenosine-3'-phosphate
  modified_base 17: mod_base = OTHER; note = 2'-O-methyladenosine-3'-phosphate
  modified_base 18: mod_base = OTHER; note = 2'-O-methyladenosine-3'-phosphate
  modified_base 19: mod_base = OTHER; note = 2'-deoxy-2'-fluorouridine-3'-phosphate
  modified_base 20: mod_base = OTHER; note = 2'-O-methyladenosine-3'-phosphate
  modified_base 21: mod_base = OTHER; note 2-hydroxymethyl-4-methoxy-tetrahydrofuran-3-phosphate ((2S,4R)-1-[29-[[2-(acetylamino)-2-deoxy-beta-D-galactopyra nosyl]oxy]-14,14-bis[[3-[[3-[[5-[[2-(acetylamino)-2-deoxy-b eta-D-galactopyranosyl]oxy]-1-oxopentyl]amino]propyl]amino] -3-oxopropoxy]methyl]-1,12,19,25-tetraoxo-16-oxa-13,20,24-t riazanonacos-1-yl]-4-hydroxy-2-pyrrolidinyl)methyl ester
atggtcagatcttcaaaatan

SEQ ID NO: 594 - RNA, 23 nt, synthetic construct
  source 1..23: mol_type = other RNA
  modified_base 1: mod_base = OTHER; note = 2'-O-methyluridine-3'-phosphorothioate
  modified_base 2: mod_base = OTHER; note = 2'-deoxy-2'-fluorouridine-3'-phosphorothioate
  modified_base 3: mod_base = OTHER; note = 2'-O-methyladenosine-3'-phosphate
  modified_base 4: mod_base = OTHER; note = 2'-O-methyluridine-3'-phosphate
  modified_base 5: mod_base = OTHER; note = 2'-deoxy-2'-fluorouridine-3'-phosphate
  modified_base 6: mod_base = OTHER; note = 2'-deoxy-2'-fluorouridine-3'-phosphate
  modified_base 7: mod_base = OTHER; note = 2'-O-methyluridine-3'-phosphate
  modified_base 8: mod_base = OTHER; note = 2'-deoxy-2'-fluoroguanosine-3'-phosphate
  modified_base 9: mod_base = OTHER; note = 2'-O-methyladenosine-3'-phosphate
  modified_base 10: mod_base = OTHER; note = 2'-O-methyladenosine-3'-phosphate
  modified_base 11: mod_base = OTHER; note = 2'-O-methylguanosine-3'-phosphate
  modified_base 12: mod_base = OTHER; note = 2'-deoxy-2'-fluoroadenosine-3'-phosphate
  modified_base 13: mod_base = OTHER; note = 2'-O-methyluridine-3'-phosphate
  modified_base 14: mod_base = OTHER; note = 2'-deoxy-2'-fluorocytidine-3'-phosphate
  modified_base 15: mod_base = OTHER; note = 2'-O-methyluridine-3'-phosphate
  modified_base 16: mod_base = OTHER; note = 2'-deoxy-2'-fluoroguanosine-3'-phosphate
  modified_base 17: mod_base = OTHER; note = 2'-O-methyladenosine-3'-phosphate
  modified_base 18: mod_base = OTHER; note = 2'-O-methylcytidine-3'-phosphate
  modified_base 19: mod_base = OTHER; note = 2'-O-methylcytidine-3'-phosphate
  modified_base 20: mod_base = OTHER; note = 2'-O-methyladenosine-3'-phosphate
  modified_base 21: mod_base = OTHER; note = 2'-O-methyluridine-3'-phosphorothioate
  modified_base 22: mod_base = OTHER; note = 2'-O-methyluridine-3'-phosphorothioate
  modified_base 23: mod_base = OTHER; note = 2'-O-methylguanosine
ttattttgaagatctgaccattg

SEQ ID NO: 595 - RNA, 23 nt, synthetic construct
  source 1..23: mol_type = other RNA
  modified_base 4: mod_base = OTHER; note = 5'-methyluridine-3'-phosphate
  modified_base 7: mod_base = OTHER; note = 5'-methyluridine-3'-phosphate
  modified_base 12: mod_base = OTHER; note = 5'-methyluridine-3'-phosphate
  modified_base 14: mod_base = OTHER; note = 5'-methyluridine-3'-phosphate
  modified_base 15: mod_base = OTHER; note = 5'-methyluridine-3'-phosphate
  modified_base 21: mod_base = OTHER; note = 5'-methyluridine-3'-phosphate
caatggtcagatcttcaaaataa

SEQ ID NO: 596 - RNA, 21 nt, synthetic construct
  source 1..21: mol_type = other RNA
  modified_base 1: mod_base = OTHER; note = 2'-O-methyladenosine-3'-phosphorothioate
  modified_base 2: mod_base = OTHER; note = 2'-O-methyluridine-3'-phosphorothioate
  modified_base 3: mod_base = OTHER; note = 2'-O-methylguanosine-3'-phosphate
  modified_base 4: mod_base = OTHER; note = 2'-O-methylguanosine-3'-phosphate
  modified_base 5: mod_base = OTHER; note = 2'-O-methyluridine-3'-phosphate
  modified_base 6: mod_base = OTHER; note = 2'-O-methylcytidine-3'-phosphate
  modified_base 7: mod_base = OTHER; note = 2'-deoxy-2'-fluoroadenosine-3'-phosphate
  modified_base 8: mod_base = OTHER; note = 2'-O-methylguanosine-3'-phosphate
  modified_base 9: mod_base = OTHER; note = 2'-deoxy-2'-fluoroadenosine-3'-phosphate
  modified_base 10: mod_base = OTHER; note = 2'-O-methyluridine-3'-phosphate
  modified_base 11: mod_base = OTHER; note = 2'-deoxy-2'-fluorocytidine-3'-phosphate
  modified_base 12: mod_base = OTHER; note = 2'-O-methyluridine-3'-phosphate
  modified_base 13: mod_base = OTHER; note = 2'-O-methyluridine-3'-phosphate
  modified_base 14: mod_base = OTHER; note = 2'-O-methylcytidine-3'-phosphate
  modified_base 15: mod_base = OTHER; note = 2'-O-methyladenosine-3'-phosphate
  modified_base 16: mod_base = OTHER; note = 2'-O-methyladenosine-3'-phosphate
  modified_base 17: mod_base = OTHER; note = 2'-O-methyladenosine-3'-phosphate
  modified_base 18: mod_base = OTHER; note = 2'-O-methyladenosine-3'-phosphate
  modified_base 19: mod_base = OTHER; note = 2'-O-methyluridine-3'-phosphate
  modified_base 20: mod_base = OTHER; note = 2'-O-methyladenosine-3'-phosphate
  modified_base 21: mod_base = OTHER; note = 2'-O-methyladenosine-3'-phosphate ((2S,4R)-1-[29-[[2-(acetylamino)-2-deoxy-beta-D-galactopyra nosyl]oxy]-14,14-bis[[3-[[3-[[5-[[2-(acetylamino)-2-deoxy-b eta-D-galactopyranosyl]oxy]-1-oxopentyl]amino]propyl]amino] -3-oxopropoxy]methyl]-1,12,19,25-tetraoxo-16-oxa-13,20,24-t riazanonacos-1-yl]-4-hydroxy-2-pyrrolidinyl)methyl ester
atggtcagatcttcaaaataa

SEQ ID NO: 597 - RNA, 23 nt, synthetic construct
  source 1..23: mol_type = other RNA
  modified_base 1: mod_base = OTHER; note = 2'-O-methyluridine-3'-phosphorothioate
  modified_base 2: mod_base = OTHER; note = 2'-deoxy-2'-fluorouridine-3'-phosphorothioate
  modified_base 3: mod_base = OTHER; note = 2'-O-methyladenosine-3'-phosphate
  modified_base 4: mod_base = OTHER; note = 2'-O-methyluridine-3'-phosphate
  modified_base 5: mod_base = OTHER; note = 2'-O-methyluridine-3'-phosphate
  modified_base 6: mod_base = OTHER; note = 2'-deoxy-2'-fluorouridine-3'-phosphate
  modified_base 7: mod_base = OTHER; note = 2'-O-methyluridine-3'-phosphate
  modified_base 8: mod_base = OTHER; note = 2'-deoxy-2'-fluoroguanosine-3'-phosphate
  modified_base 9: mod_base = OTHER; note = 2'-deoxy-2'-fluoroadenosine-3'-phosphate
  modified_base 10: mod_base = OTHER; note = 2'-O-methyladenosine-3'-phosphate
  modified_base 11: mod_base = OTHER; note = 2'-O-methylguanosine-3'-phosphate
  modified_base 12: mod_base = OTHER; note = 2'-deoxy-2'-fluoroadenosine-3'-phosphate
  modified_base 13: mod_base = OTHER; note = 2'-O-methyluridine-3'-phosphate
  modified_base 14: mod_base = OTHER; note = 2'-deoxy-2'-fluorocytidine-3'-phosphate
  modified_base 15: mod_base = OTHER; note = 2'-O-methyluridine-3'-phosphate
  modified_base 16: mod_base = OTHER; note = 2'-deoxy-2'-fluoroguanosine-3'-phosphate
  modified_base 17: mod_base = OTHER; note = 2'-O-methyladenosine-3'-phosphate
  modified_base 18: mod_base = OTHER; note = 2'-O-methylcytidine-3'-phosphate
  modified_base 19: mod_base = OTHER; note = 2'-O-methylcytidine-3'-phosphate
  modified_base 20: mod_base = OTHER; note = 2'-O-methyladenosine-3'-phosphate
  modified_base 21: mod_base = OTHER; note = 2'-O-methyluridine-3'-phosphorothioate
  modified_base 22: mod_base = OTHER; note = 2'-O-methyluridine-3'-phosphorothioate
  modified_base 23: mod_base = OTHER; note = 2'-O-methylguanosine
ttattttgaagatctgaccattg

SEQ ID NO: 598 - RNA, 23 nt, synthetic construct
  source 1..23: mol_type = other RNA
  modified_base 4: mod_base = OTHER; note = 5'-methyluridine-3'-phosphate
  modified_base 7: mod_base = OTHER; note = 5'-methyluridine-3'-phosphate
  modified_base 12: mod_base = OTHER; note = 5'-methyluridine-3'-phosphate
  modified_base 14: mod_base = OTHER; note = 5'-methyluridine-3'-phosphate
  modified_base 15: mod_base = OTHER; note = 5'-methyluridine-3'-phosphate
  modified_base 21: mod_base = OTHER; note = 5'-methyluridine-3'-phosphate
caatggtcagatcttcaaaataa

SEQ ID NO: 599 - RNA, 21 nt, synthetic construct
  source 1..21: mol_type = other RNA
  modified_base 1: mod_base = OTHER; note = 2'-O-methyluridine-3'-phosphorothioate
  modified_base 2: mod_base = OTHER; note = 2'-O-methyluridine-3'-phosphorothioate
  modified_base 3: mod_base = OTHER; note = 2'-O-methylguanosine-3'-phosphate
  modified_base 4: mod_base = OTHER; note = 2'-O-methyluridine-3'-phosphate
  modified_base 5: mod_base = OTHER; note = 2'-O-methylguanosine-3'-phosphate
  modified_base 6: mod_base = OTHER; note = 2'-O-methyluridine-3'-phosphate
  modified_base 7: mod_base = OTHER; note = 2'-deoxy-2'-fluorocytidine-3'-phosphate
  modified_base 8: mod_base = OTHER; note = 2'-O-methyladenosine-3'-phosphate
  modified_base 9: mod_base = OTHER; note = 2'-deoxy-2'-fluoroadenosine-3'-phosphate
  modified_base 10: mod_base = OTHER; note = 2'-O-methyladenosine-3'-phosphate
  modified_base 11: mod_base = OTHER; note = 2'-deoxy-2'-fluoroadenosine-3'-phosphate
  modified_base 12: mod_base = OTHER; note = 2'-O-methyluridine-3'-phosphate
  modified_base 13: mod_base = OTHER; note = 2'-O-methylguanosine-3'-phosphate
  modified_base 14: mod_base = OTHER; note = 2'-O-methyluridine-3'-phosphate
  modified_base 15: mod_base = OTHER; note = 2'-O-methyluridine-3'-phosphate
  modified_base 16: mod_base = OTHER; note = 2'-O-methylcytidine-3'-phosphate
  modified_base 17: mod_base = OTHER; note = 2'-O-methyluridine-3'-phosphate
  modified_base 18: mod_base = OTHER; note = 2'-O-methyladenosine-3'-phosphate
  modified_base 19: mod_base = OTHER; note = 2'-O-methylcytidine-3'-phosphate
  modified_base 20: mod_base = OTHER; note = 2'-O-methyladenosine-3'-phosphate
  modified_base 21: mod_base = OTHER; note = 2'-O-methyluridine-3'-phosphate ((2S,4R)-1-[29-[[2-(acetylamino)-2-deoxy-beta-D-galactopyra nosyl]oxy]-14,14-bis[[3-[[3-[[5-[[2-(acetylamino)-2-deoxy-b eta-D-galactopyranosyl]oxy]-1-oxopentyl]amino]propyl]amino] -3-oxopropoxy]methyl]-1,12,19,25-tetraoxo-16-oxa-13,20,24-t riazanonacos-1-yl]-4-hydroxy-2-pyrrolidinyl)methyl ester
ttgtgtcaaaatgttctacat

SEQ ID NO: 600 - RNA, 23 nt, synthetic construct
  source 1..23: mol_type = other RNA
  modified_base 1: mod_base = OTHER; note = 2'-O-methyladenosine-3'-phosphorothioate
  modified_base 2: mod_base = OTHER; note = 2'-deoxy-2'-fluorouridine-3'-phosphorothioate
  modified_base 3: mod_base = OTHER; note = 2'-O-methylguanosine-3'-phosphate
  modified_base 4: mod_base = OTHER; note = 2'-O-methyluridine-3'-phosphate
  modified_base 5: mod_base = OTHER; note = 2'-O-methyladenosine-3'-phosphate
  modified_base 6: mod_base = OTHER; note = Guanosine-glycol nucleic acid (GNA), S-isomer
  modified_base 7: mod_base = OTHER; note = 2'-O-methyladenosine-3'-phosphate
  modified_base 8: mod_base = OTHER; note = 2'-O-methyladenosine-3'-phosphate
  modified_base 9: mod_base = OTHER; note = 2'-O-methylcytidine-3'-phosphate
  modified_base 10: mod_base = OTHER; note = 2'-O-methyladenosine-3'-phosphate
  modified_base 11: mod_base = OTHER; note = 2'-O-methyluridine-3'-phosphate
  modified_base 12: mod_base = OTHER; note = 2'-deoxy-2'-fluorouridine-3'-phosphate
  modified_base 13: mod_base = OTHER; note = 2'-O-methyluridine-3'-phosphate
  modified_base 14: mod_base = OTHER; note = 2'-deoxy-2'-fluorouridine-3'-phosphate
  modified_base 15: mod_base = OTHER; note = 2'-O-methylguanosine-3'-phosphate
  modified_base 16: mod_base = OTHER; note = 2'-deoxy-2'-fluoroadenosine-3'-phosphate
  modified_base 17: mod_base = OTHER; note = 2'-O-methylcytidine-3'-phosphate
  modified_base 18: mod_base = OTHER; note = 2'-O-methyladenosine-3'-phosphate
  modified_base 19: mod_base = OTHER; note = 2'-O-methylcytidine-3'-phosphate
  modified_base 20: mod_base = OTHER; note = 2'-O-methyladenosine-3'-phosphate
  modified_base 21: mod_base = OTHER; note = 2'-O-methyladenosine-3'-phosphorothioate
  modified_base 22: mod_base = OTHER; note = 2'-O-methyladenosine-3'-phosphorothioate
  modified_base 23: mod_base = OTHER; note = 2'-O-methyladenosine
atgtagaacattttgacacaaaa

SEQ ID NO: 601 - RNA, 23 nt, synthetic construct
  source 1..23: mol_type = other RNA
  modified_base 1: mod_base = OTHER; note = 5'-methyluridine-3'-phosphate
  modified_base 2: mod_base = OTHER; note = 5'-methyluridine-3'-phosphate
  modified_base 3: mod_base = OTHER; note = 5'-methyluridine-3'-phosphate
  modified_base 4: mod_base = OTHER; note = 5'-methyluridine-3'-phosphate
  modified_base 6: mod_base = OTHER; note = 5'-methyluridine-3'-phosphate
  modified_base 8: mod_base = OTHER; note = 5'-methyluridine-3'-phosphate
  modified_base 14: mod_base = OTHER; note = 5'-methyluridine-3'-phosphate
  modified_base 16: mod_base = OTHER; note = 5'-methyluridine-3'-phosphate
  modified_base 17: mod_base = OTHER; note = 5'-methyluridine-3'-phosphate
  modified_base 19: mod_base = OTHER; note = 5'-methyluridine-3'-phosphate
  modified_base 23: mod_base = OTHER; note = 5'-methyluridine
ttttgtgtcaaaatgttctacat

SEQ ID NO: 602 - RNA, 21 nt, synthetic construct
  source 1..21: mol_type = other RNA
  modified_base 1: mod_base = OTHER; note = 2'-O-methyluridine-3'-phosphorothioate
  modified_base 2: mod_base = OTHER; note = 2'-O-methyluridine-3'-phosphorothioate
  modified_base 3: mod_base = OTHER; note = 2'-O-methylguanosine-3'-phosphate
  modified_base 4: mod_base = OTHER; note = 2'-O-methyluridine-3'-phosphate
  modified_base 5: mod_base = OTHER; note = 2'-O-methylguanosine-3'-phosphate
  modified_base 6: mod_base = OTHER; note = 2'-O-methyluridine-3'-phosphate
  modified_base 7: mod_base = OTHER; note = 2'-deoxy-2'-fluorocytidine-3'-phosphate
  modified_base 8: mod_base = OTHER; note = 2'-O-methyladenosine-3'-phosphate
  modified_base 9: mod_base = OTHER; note = 2'-deoxy-2'-fluoroadenosine-3'-phosphate
  modified_base 10: mod_base = OTHER; note = 2'-O-methyladenosine-3'-phosphate
  modified_base 11: mod_base = OTHER; note = 2'-deoxy-2'-fluoroadenosine-3'-phosphate
  modified_base 12: mod_base = OTHER; note = 2'-O-methyluridine-3'-phosphate
  modified_base 13: mod_base = OTHER; note = 2'-O-methylguanosine-3'-phosphate
  modified_base 14: mod_base = OTHER; note = 2'-O-methyluridine-3'-phosphate
  modified_base 15: mod_base = OTHER; note = 2'-O-methyluridine-3'-phosphate
  modified_base 16: mod_base = OTHER; note = 2'-O-methylcytidine-3'-phosphate
  modified_base 17: mod_base = OTHER; note = 2'-O-methyluridine-3'-phosphate
  modified_base 18: mod_base = OTHER; note = 2'-O-methyladenosine-3'-phosphate
  modified_base 19: mod_base = OTHER; note = 2'-O-methylcytidine-3'-phosphate
  modified_base 20: mod_base = OTHER; note = 2'-O-methyladenosine-3'-phosphate
  modified_base 21: mod_base = OTHER; note = 2'-O-methyluridine-3'-phosphate ((2S,4R)-1-[29-[[2-(acetylamino)-2-deoxy-beta-D-galactopyra nosyl]oxy]-14,14-bis[[3-[[3-[[5-[[2-(acetylamino)-2-deoxy-b eta-D-galactopyranosyl]oxy]-1-oxopentyl]amino]propyl]amino] -3-oxopropoxy]methyl]-1,12,19,25-tetraoxo-16-oxa-13,20,24-t riazanonacos-1-yl]-4-hydroxy-2-pyrrolidinyl)methyl ester
ttgtgtcaaaatgttctacat

SEQ ID NO: 603 - RNA, 23 nt, synthetic construct
  source 1..23: mol_type = other RNA
  modified_base 1: mod_base = OTHER; note = 2'-O-methyladenosine-3'-phosphorothioate
  modified_base 2: mod_base = OTHER; note = 2'-deoxy-2'-fluorouridine-3'-phosphorothioate
  modified_base 3: mod_base = OTHER; note = 2'-O-methylguanosine-3'-phosphate
  modified_base 4: mod_base = OTHER; note = 2'-O-methyluridine-3'-phosphate
  modified_base 5: mod_base = OTHER; note = 2'-O-methyladenosine-3'-phosphate
  modified_base 6: mod_base = OTHER; note = 2'-O-methylguanosine-3'-phosphate
  modified_base 7: mod_base = OTHER; note = Adenosine-glycol nucleic acid (GNA), S-isomer
  modified_base 8: mod_base = OTHER; note = 2'-O-methyladenosine-3'-phosphate
  modified_base 9: mod_base = OTHER; note = 2'-O-methylcytidine-3'-phosphate
  modified_base 10: mod_base = OTHER; note = 2'-O-methyladenosine-3'-phosphate
  modified_base 11: mod_base = OTHER; note = 2'-O-methyluridine-3'-phosphate
  modified_base 12: mod_base = OTHER; note = 2'-deoxy-2'-fluorouridine-3'-phosphate
  modified_base 13: mod_base = OTHER; note = 2'-O-methyluridine-3'-phosphate
  modified_base 14: mod_base = OTHER; note = 2'-deoxy-2'-fluorouridine-3'-phosphate
  modified_base 15: mod_base = OTHER; note = 2'-O-methylguanosine-3'-phosphate
  modified_base 16: mod_base = OTHER; note = 2'-deoxy-2'-fluoroadenosine-3'-phosphate
  modified_base 17: mod_base = OTHER; note = 2'-O-methylcytidine-3'-phosphate
  modified_base 18: mod_base = OTHER; note = 2'-O-methyladenosine-3'-phosphate
  modified_base 19: mod_base = OTHER; note = 2'-O-methylcytidine-3'-phosphate
  modified_base 20: mod_base = OTHER; note = 2'-O-methyladenosine-3'-phosphate
  modified_base 21: mod_base = OTHER; note = 2'-O-methyladenosine-3'-phosphorothioate
  modified_base 22: mod_base = OTHER; note = 2'-O-methyladenosine-3'-phosphorothioate
  modified_base 23: mod_base = OTHER; note = 2'-O-methyladenosine
atgtagaacattttgacacaaaa

SEQ ID NO: 604 - RNA, 23 nt, synthetic construct
  source 1..23: mol_type = other RNA
  modified_base 1: mod_base = OTHER; note = 5'-methyluridine-3'-phosphate
  modified_base 2: mod_base = OTHER; note = 5'-methyluridine-3'-phosphate
  modified_base 3: mod_base = OTHER; note = 5'-methyluridine-3'-phosphate
  modified_base 4: mod_base = OTHER; note = 5'-methyluridine-3'-phosphate
  modified_base 6: mod_base = OTHER; note = 5'-methyluridine-3'-phosphate
  modified_base 8: mod_base = OTHER; note = 5'-methyluridine-3'-phosphate
  modified_base 14: mod_base = OTHER; note = 5'-methyluridine-3'-phosphate
  modified_base 16: mod_base = OTHER; note = 5'-methyluridine-3'-phosphate
  modified_base 17: mod_base = OTHER; note = 5'-methyluridine-3'-phosphate
  modified_base 19: mod_base = OTHER; note = 5'-methyluridine-3'-phosphate
  modified_base 23: mod_base = OTHER; note = 5'-methyluridine
ttttgtgtcaaaatgttctacat

SEQ ID NO: 605 - RNA, 21 nt, synthetic construct
  source 1..21: mol_type = other RNA
  modified_base 1: mod_base = OTHER; note = 2'-O-methyladenosine-3'-phosphorothioate
  modified_base 2: mod_base = OTHER; note = 2'-O-methylguanosine-3'-phosphorothioate
  modified_base 3: mod_base = OTHER; note = 2'-O-methylcytidine-3'-phosphate
  modified_base 4: mod_base = OTHER; note = 2'-O-methyluridine-3'-phosphate
  modified_base 5: mod_base = OTHER; note = 2'-O-methyladenosine-3'-phosphate
  modified_base 6: mod_base = OTHER; note = 2'-O-methylguanosine-3'-phosphate
  modified_base 7: mod_base = OTHER; note = 2'-deoxy-2'-fluoroguanosine-3'-phosphate
  modified_base 8: mod_base = OTHER; note = 2'-O-methyladenosine-3'-phosphate
  modified_base 9: mod_base = OTHER; note = 2'-deoxy-2'-fluoroadenosine-3'-phosphate
  modified_base 10: mod_base = OTHER; note = 2'-deoxy-2'-fluoroguanosine-3'-phosphate
  modified_base 11: mod_base = OTHER; note = 2'-deoxy-2'-fluorouridine-3'-phosphate
  modified_base 12: mod_base = OTHER; note = 2'-O-methyladenosine-3'-phosphate
  modified_base 13: mod_base = OTHER; note = 2'-O-methyluridine-3'-phosphate
  modified_base 14: mod_base = OTHER; note = 2'-O-methyluridine-3'-phosphate
  modified_base 15: mod_base = OTHER; note = 2'-O-methylcytidine-3'-phosphate
  modified_base 16: mod_base = OTHER; note = 2'-O-methyladenosine-3'-phosphate
  modified_base 17: mod_base = OTHER; note = 2'-O-methyluridine-3'-phosphate
  modified_base 18: mod_base = OTHER; note = 2'-O-methyluridine-3'-phosphate
  modified_base 19: mod_base = OTHER; note = 2'-O-methylcytidine-3'-phosphate
  modified_base 20: mod_base = OTHER; note = 2'-O-methyladenosine-3'-phosphate
  modified_base 21: mod_base = OTHER; note = 2'-O-methyladenosine-3'-phosphate ((2S,4R)-1-[29-[[2-(acetylamino)-2-deoxy-beta-D-galactopyra nosyl]oxy]-14,14-bis[[3-[[3-[[5-[[2-(acetylamino)-2-deoxy-b eta-D-galactopyranosyl]oxy]-1-oxopentyl]amino]propyl]amino] -3-oxopropoxy]methyl]-1,12,19,25-tetraoxo-16-oxa-13,20,24-t riazanonacos-1-yl]-4-hydroxy-2-pyrrolidinyl)methyl ester
agctaggaagtattcattcaa

SEQ ID NO: 606 - RNA, 23 nt, synthetic construct
  source 1..23: mol_type = other RNA
  modified_base 1: mod_base = OTHER; note = 2'-O-methyluridine-3'-phosphorothioate
  modified_base 2: mod_base = OTHER; note = 2'-deoxy-2'-fluorouridine-3'-phosphorothioate
  modified_base 3: mod_base = OTHER; note = 2'-O-methylguanosine-3'-phosphate
  modified_base 4: mod_base = OTHER; note = 2'-O-methyladenosine-3'-phosphate
  modified_base 5: mod_base = OTHER; note = 2'-O-methyladenosine-3'-phosphate
  modified_base 6: mod_base = OTHER; note = 2'-deoxy-2'-fluorouridine-3'-phosphate
  modified_base 7: mod_base = OTHER; note = 2'-O-methylguanosine-3'-phosphate
  modified_base 8: mod_base = OTHER; note = 2'-deoxy-2'-fluoroadenosine-3'-phosphate
  modified_base 9: mod_base = OTHER; note = 2'-deoxy-2'-fluoroadenosine-3'-phosphate
  modified_base 10: mod_base = OTHER; note = 2'-O-methyluridine-3'-phosphate
  modified_base 11: mod_base = OTHER; note = 2'-O-methyladenosine-3'-phosphate
  modified_base 12: mod_base = OTHER; note = 2'-O-methylcytidine-3'-phosphate
  modified_base 13: mod_base = OTHER; note = 2'-O-methyluridine-3'-phosphate
  modified_base 14: mod_base = OTHER; note = 2'-deoxy-2'-fluorouridine-3'-phosphate
  modified_base 15: mod_base = OTHER; note = 2'-O-methylcytidine-3'-phosphate
  modified_base 16: mod_base = OTHER; note = 2'-deoxy-2'-fluorocytidine-3'-phosphate
  modified_base 17: mod_base = OTHER; note = 2'-O-methyluridine-3'-phosphate
  modified_base 18: mod_base = OTHER; note = 2'-O-methyladenosine-3'-phosphate
  modified_base 19: mod_base = OTHER; note = 2'-O-methylguanosine-3'-phosphate
  modified_base 20: mod_base = OTHER; note = 2'-O-methylcytidine-3'-phosphate
  modified_base 21: mod_base = OTHER; note = 2'-O-methyluridine-3'-phosphorothioate
  modified_base 22: mod_base = OTHER; note = 2'-O-methyladenosine-3'-phosphorothioate
  modified_base 23: mod_base = OTHER; note = 2'-O-methyluridine
ttgaatgaatacttcctagctat

SEQ ID NO: 607 - RNA, 23 nt, synthetic construct
  source 1..23: mol_type = other RNA
  modified_base 2: mod_base = OTHER; note = 5'-methyluridine-3'-phosphate
  modified_base 6: mod_base = OTHER; note = 5'-methyluridine-3'-phosphate
  modified_base 13: mod_base = OTHER; note = 5'-methyluridine-3'-phosphate
  modified_base 15: mod_base = OTHER; note = 5'-methyluridine-3'-phosphate
  modified_base 16: mod_base = OTHER; note = 5'-methyluridine-3'-phosphate
  modified_base 19: mod_base = OTHER; note = 5'-methyluridine-3'-phosphate
  modified_base 20: mod_base = OTHER; note = 5'-methyluridine-3'-phosphate
atagctaggaagtattcattcaa

SEQ ID NO: 608 - RNA, 21 nt, synthetic construct
  source 1..21: mol_type = other RNA
  modified_base 1: mod_base = OTHER; note = 2'-O-methylcytidine-3'-phosphorothioate
  modified_base 2: mod_base = OTHER; note = 2'-O-methyladenosine-3'-phosphorothioate
  modified_base 3: mod_base = OTHER; note = 2'-O-methyluridine-3'-phosphate
  modified_base 4: mod_base = OTHER; note = 2'-O-methylguanosine-3'-phosphate
  modified_base 5: mod_base = OTHER; note = 2'-O-methyluridine-3'-phosphate
  modified_base 6: mod_base = OTHER; note = 2'-O-methylguanosine-3'-phosphate
  modified_base 7: mod_base = OTHER; note = 2'-deoxy-2'-fluorocytidine-3'-phosphate
  modified_base 8: mod_base = OTHER; note = 2'-O-methyladenosine-3'-phosphate
  modified_base 9: mod_base = OTHER; note = 2'-deoxy-2'-fluorocytidine-3'-phosphate
  modified_base 10: mod_base = OTHER; note = 2'-deoxy-2'-fluoroadenosine-3'-phosphate
  modified_base 11: mod_base = OTHER; note = 2'-deoxy-2'-fluorouridine-3'-phosphate
  modified_base 12: mod_base = OTHER; note = 2'-O-hexadecyl-uridine-3'-phosphate
  modified_base 13: mod_base = OTHER; note = 2'-O-methylguanosine-3'-phosphate
  modified_base 14: mod_base = OTHER; note = 2'-O-methyladenosine-3'-phosphate
  modified_base 15: mod_base = OTHER; note = 2'-O-methyladenosine-3'-phosphate
  modified_base 16: mod_base = OTHER; note = 2'-O-methyladenosine-3'-phosphate
  modified_base 17: mod_base = OTHER; note = 2'-O-methyladenosine-3'-phosphate
  modified_base 18: mod_base = OTHER; note = 2'-O-methylcytidine-3'-phosphate
  modified_base 19: mod_base = OTHER; note = 2'-O-methyluridine-3'-phosphate
  modified_base 20: mod_base = OTHER; note = 2'-O-methylguanosine-3'-phosphate
  modified_base 21: mod_base = OTHER; note = 2'-O-methyluridine-3'-phosphate ((2S,4R)-1-[29-[[2-(acetylamino)-2-deoxy-beta-D-galactopyra nosyl]oxy]-14,14-bis[[3-[[3-[[5-[[2-(acetylamino)-2-deoxy-b eta-D-galactopyranosyl]oxy]-1-oxopentyl]amino]propyl]amino] -3-oxopropoxy]methyl]-1,12,19,25-tetraoxo-16-oxa-13,20,24-t riazanonacos-1-yl]-4-hydroxy-2-pyrrolidinyl)methyl ester
catgtgcacattgaaaactgt

SEQ ID NO: 609 - RNA, 23 nt, synthetic construct
  source 1..23: mol_type = other RNA
  modified_base 1: mod_base = OTHER; note = 2'-O-methyladenosine-3'-phosphorothioate
  modified_base 2: mod_base = OTHER; note = 2'-deoxy-2'-fluorocytidine-3'-phosphorothioate
  modified_base 3: mod_base = OTHER; note = 2'-O-methyladenosine-3'-phosphate
  modified_base 4: mod_base = OTHER; note = 2'-O-methylguanosine-3'-phosphate
  modified_base 5: mod_base = OTHER; note = 2'-O-methyluridine-3'-phosphate
  modified_base 6: mod_base = OTHER; note = 2'-deoxy-2'-fluorouridine-3'-phosphate
  modified_base 7: mod_base = OTHER; note = 2'-O-methyluridine-3'-phosphate
  modified_base 8: mod_base = OTHER; note = 2'-deoxy-2'-fluorouridine-3'-phosphate
  modified_base 9: mod_base = OTHER; note = 2'-deoxy-2'-fluorocytidine-3'-phosphate
  modified_base 10: mod_base = OTHER; note = 2'-O-methyladenosine-3'-phosphate
  modified_base 11: mod_base = OTHER; note = 2'-O-methyladenosine-3'-phosphate
  modified_base 12: mod_base = OTHER; note = 2'-O-methyluridine-3'-phosphate
  modified_base 13: mod_base = OTHER; note = 2'-O-methylguanosine-3'-phosphate
  modified_base 14: mod_base = OTHER; note = 2'-deoxy-2'-fluorouridine-3'-phosphate
  modified_base 15: mod_base = OTHER; note = 2'-O-methylguanosine-3'-phosphate
  modified_base 16: mod_base = OTHER; note = 2'-deoxy-2'-fluorocytidine-3'-phosphate
  modified_base 17: mod_base = OTHER; note = 2'-O-methyladenosine-3'-phosphate
  modified_base 18: mod_base = OTHER; note = 2'-O-methylcytidine-3'-phosphate
  modified_base 19: mod_base = OTHER; note = 2'-O-methyladenosine-3'-phosphate
  modified_base 20: mod_base = OTHER; note = 2'-O-methyluridine-3'-phosphate
  modified_base 21: mod_base = OTHER; note = 2'-O-methylguanosine-3'-phosphorothioate
  modified_base 22: mod_base = OTHER; note = 2'-O-methylcytidine-3'-phosphorothioate
  modified_base 23: mod_base = OTHER; note = 2'-O-methylguanosine
acagttttcaatgtgcacatgcg

SEQ ID NO: 610 - RNA, 23 nt, synthetic construct
  source 1..23: mol_type = other RNA
  modified_base 5: mod_base = OTHER; note = 5'-methyluridine-3'-phosphate
  modified_base 7: mod_base = OTHER; note = 5'-methyluridine-3'-phosphate
  modified_base 13: mod_base = OTHER; note = 5'-methyluridine-3'-phosphate
  modified_base 14: mod_base = OTHER; note = 5'-methyluridine-3'-phosphate
  modified_base 21: mod_base = OTHER; note = 5'-methyluridine-3'-phosphate
  modified_base 23: mod_base = OTHER; note = 5'-methyluridine
cgcatgtgcacattgaaaactgt

SEQ ID NO: 611 - RNA, 21 nt, synthetic construct
  source 1..21: mol_type = other RNA
  modified_base 1: mod_base = OTHER; note = 2'-O-methylcytidine-3'-phosphorothioate
  modified_base 2: mod_base = OTHER; note = 2'-O-methyladenosine-3'-phosphorothioate
  modified_base 3: mod_base = OTHER; note = 2'-O-methyluridine-3'-phosphate
  modified_base 4: mod_base = OTHER; note = 2'-O-methylguanosine-3'-phosphate
  modified_base 5: mod_base = OTHER; note = 2'-O-methyluridine-3'-phosphate
  modified_base 6: mod_base = OTHER; note = 2'-deoxy-2'-fluoroguanosine-3'-phosphate
  modified_base 7: mod_base = OTHER; note = 2'-deoxy-2'-fluorocytidine-3'-phosphate
  modified_base 8: mod_base = OTHER; note = 2'-O-methyladenosine-3'-phosphate
  modified_base 9: mod_base = OTHER; note = 2'-deoxy-2'-fluorocytidine-3'-phosphate
  modified_base 10: mod_base = OTHER; note = 2'-O-methyladenosine-3'-phosphate
  modified_base 11: mod_base = OTHER; note = 2'-deoxy-2'-fluorouridine-3'-phosphate
  modified_base 12: mod_base = OTHER; note = 2'-deoxy-2'-fluorouridine-3'-phosphate
  modified_base 13: mod_base = OTHER; note = 2'-O-methylguanosine-3'-phosphate
  modified_base 14: mod_base = OTHER; note = 2'-O-methyladenosine-3'-phosphate
  modified_base 15: mod_base = OTHER; note = 2'-O-methyladenosine-3'-phosphate
  modified_base 16: mod_base = OTHER; note = 2'-O-methyladenosine-3'-phosphate
  modified_base 17: mod_base = OTHER; note = 2'-O-methyladenosine-3'-phosphate
  modified_base 18: mod_base = OTHER; note = 2'-O-methylcytidine-3'-phosphate
  modified_base 19: mod_base = OTHER; note = 2'-deoxy-2'-fluorouridine-3'-phosphate
  modified_base 20: mod_base = OTHER; note = 2'-O-methylguanosine-3'-phosphate
  modified_base 21: mod_base = OTHER; note = 2'-deoxy-2'-fluorouridine-3'-phosphate ((2S,4R)-1-[29-[[2-(acetylamino)-2-deoxy-beta-D-galactopyra nosyl]oxy]-14,14-bis[[3-[[3-[[5-[[2-(acetylamino)-2-deoxy-b eta-D-galactopyranosyl]oxy]-1-oxopentyl]amino]propyl]amino] -3-oxopropoxy]methyl]-1,12,19,25-tetraoxo-16-oxa-13,20,24-t riazanonacos-1-yl]-4-hydroxy-2-pyrrolidinyl)methyl ester
catgtgcacattgaaaactgt

SEQ ID NO: 612 - RNA, 23 nt, synthetic construct
  source 1..23: mol_type = other RNA
  modified_base 1: mod_base = OTHER; note = 2'-O-methyladenosine-3'-phosphorothioate
  modified_base 2: mod_base = OTHER; note = 2'-deoxy-2'-fluorocytidine-3'-phosphorothioate
  modified_base 3: mod_base = OTHER; note = 2'-O-methyladenosine-3'-phosphate
  modified_base 4: mod_base = OTHER; note = 2'-O-methylguanosine-3'-phosphate
  modified_base 5: mod_base = OTHER; note = 2'-deoxy-2'-fluorouridine-3'-phosphate
  modified_base 6: mod_base = OTHER; note = 2'-deoxy-2'-fluorouridine-3'-phosphate
  modified_base 7: mod_base = OTHER; note = 2'-O-methyluridine-3'-phosphate
  modified_base 8: mod_base = OTHER; note = 2'-deoxy-2'-fluorouridine-3'-phosphate
  modified_base 9: mod_base = OTHER; note = 2'-O-methylcytidine-3'-phosphate
  modified_base 10: mod_base = OTHER; note = 2'-O-methyladenosine-3'-phosphate
  modified_base 11: mod_base = OTHER; note = 2'-O-methyladenosine-3'-phosphate
  modified_base 12: mod_base = OTHER; note = 2'-deoxy-2'-fluorouridine-3'-phosphate
  modified_base 13: mod_base = OTHER; note = 2'-O-methylguanosine-3'-phosphate
  modified_base 14: mod_base = OTHER; note = 2'-deoxy-2'-fluorouridine-3'-phosphate
  modified_base 15: mod_base = OTHER; note = 2'-O-methylguanosine-3'-phosphate
  modified_base 16: mod_base = OTHER; note = 2'-deoxy-2'-fluorocytidine-3'-phosphate
  modified_base 17: mod_base = OTHER; note = 2'-O-methyladenosine-3'-phosphate
  modified_base 18: mod_base = OTHER; note = 2'-O-methylcytidine-3'-phosphate
  modified_base 19: mod_base = OTHER; note = 2'-O-methyladenosine-3'-phosphate
  modified_base 20: mod_base = OTHER; note = 2'-O-methyluridine-3'-phosphate
  modified_base 21: mod_base = OTHER; note = 2'-deoxy-2'-fluoroguanosine-3'-phosphorothioate
  modified_base 22: mod_base = OTHER; note = 2'-O-methylcytidine-3'-phosphorothioate
  modified_base 23: mod_base = OTHER; note = 2'-O-methylguanosine
acagttttcaatgtgcacatgcg

SEQ ID NO: 613 - RNA, 23 nt, synthetic construct
  source 1..23: mol_type = other RNA
  modified_base 5: mod_base = OTHER; note = 5'-methyluridine-3'-phosphate
  modified_base 7: mod_base = OTHER; note = 5'-methyluridine-3'-phosphate
  modified_base 13: mod_base = OTHER; note = 5'-methyluridine-3'-phosphate
  modified_base 14: mod_base = OTHER; note = 5'-methyluridine-3'-phosphate
  modified_base 21: mod_base = OTHER; note = 5'-methyluridine-3'-phosphate
  modified_base 23: mod_base = OTHER; note = 5'-methyluridine
cgcatgtgcacattgaaaactgt

SEQ ID NO: 614 - RNA, 21 nt, synthetic construct
  source 1..21: mol_type = other RNA
  modified_base 1: mod_base = OTHER; note = 2'-O-methylcytidine-3'-phosphorothioate
  modified_base 2: mod_base = OTHER; note = 2'-O-methyluridine-3'-phosphorothioate
  modified_base 3: mod_base = OTHER; note = 2'-O-methyladenosine-3'-phosphate
  modified_base 4: mod_base = OTHER; note = 2'-O-methylguanosine-3'-phosphate
  modified_base 5: mod_base = OTHER; note = 2'-O-methylguanosine-3'-phosphate
  modified_base 6: mod_base = OTHER; note = 2'-O-methyladenosine-3'-phosphate
  modified_base 7: mod_base = OTHER; note = 2'-deoxy-2'-fluoroadenosine-3'-phosphate
  modified_base 8: mod_base = OTHER; note = 2'-O-methylguanosine-3'-phosphate
  modified_base 9: mod_base = OTHER; note = 2'-deoxy-2'-fluorouridine-3'-phosphate
  modified_base 10: mod_base = OTHER; note = 2'-deoxy-2'-fluoroadenosine-3'-phosphate
  modified_base 11: mod_base = OTHER; note = 2'-deoxy-2'-fluorouridine-3'-phosphate
  modified_base 12: mod_base = OTHER; note = 2'-O-methyluridine-3'-phosphate
  modified_base 13: mod_base = OTHER; note = 2'-O-methylcytidine-3'-phosphate
  modified_base 14: mod_base = OTHER; note = 2'-O-methyladenosine-3'-phosphate
  modified_base 15: mod_base = OTHER; note = 2'-O-methyluridine-3'-phosphate
  modified_base 16: mod_base = OTHER; note = 2'-O-methyluridine-3'-phosphate
  modified_base 17: mod_base = OTHER; note = 2'-O-methylcytidine-3'-phosphate
  modified_base 18: mod_base = OTHER; note = 2'-O-methyladenosine-3'-phosphate
  modified_base 19: mod_base = OTHER; note = 2'-O-methyladenosine-3'-phosphate
  modified_base 20: mod_base = OTHER; note = 2'-O-methyladenosine-3'-phosphate
  modified_base 21: mod_base = OTHER; note = 2'-O-methyladenosine-3'-phosphate ((2S,4R)-1-[29-[[2-(acetylamino)-2-deoxy-beta-D-galactopyra nosyl]oxy]-14,14-bis[[3-[[3-[[5-[[2-(acetylamino)-2-deoxy-b eta-D-galactopyranosyl]oxy]-1-oxopentyl]amino]propyl]amino] -3-oxopropoxy]methyl]-1,12,19,25-tetraoxo-16-oxa-13,20,24-t riazanonacos-1-yl]-4-hydroxy-2-pyrrolidinyl)methyl ester
ctaggaagtattcattcaaaa

SEQ ID NO: 615 - RNA, 23 nt, synthetic construct
  source 1..23: mol_type = other RNA
  modified_base 1: mod_base = OTHER; note = 2'-O-methyluridine-3'-phosphorothioate
  modified_base 2: mod_base = OTHER; note = 2'-deoxy-2'-fluorouridine-3'-phosphorothioate
  modified_base 3: mod_base = OTHER; note = 2'-O-methyluridine-3'-phosphate
  modified_base 4: mod_base = OTHER; note = 2'-O-methyluridine-3'-phosphate
  modified_base 5: mod_base = OTHER; note = 2'-O-methylguanosine-3'-phosphate
  modified_base 6: mod_base = OTHER; note = 2'-deoxy-2'-fluoroadenosine-3'-phosphate
  modified_base 7: mod_base = OTHER; note = 2'-O-methyladenosine-3'-phosphate
  modified_base 8: mod_base = OTHER; note = 2'-deoxy-2'-fluorouridine-3'-phosphate
  modified_base 9: mod_base = OTHER; note = 2'-deoxy-2'-fluoroguanosine-3'-phosphate
  modified_base 10: mod_base = OTHER; note = 2'-O-methyladenosine-3'-phosphate
  modified_base 11: mod_base = OTHER; note = 2'-O-methyladenosine-3'-phosphate
  modified_base 12: mod_base = OTHER; note = 2'-O-methyluridine-3'-phosphate
  modified_base 13: mod_base = OTHER; note = 2'-O-methyladenosine-3'-phosphate
  modified_base 14: mod_base = OTHER; note = 2'-deoxy-2'-fluorocytidine-3'-phosphate
  modified_base 15: mod_base = OTHER; note = 2'-O-methyluridine-3'-phosphate
  modified_base 16: mod_base = OTHER; note = 2'-deoxy-2'-fluorouridine-3'-phosphate
  modified_base 17: mod_base = OTHER; note = 2'-O-methylcytidine-3'-phosphate
  modified_base 18: mod_base = OTHER; note = 2'-O-methylcytidine-3'-phosphate
  modified_base 19: mod_base = OTHER; note = 2'-O-methyluridine-3'-phosphate
  modified_base 20: mod_base = OTHER; note = 2'-O-methyladenosine-3'-phosphate
  modified_base 21: mod_base = OTHER; note = 2'-O-methylguanosine-3'-phosphorothioate
  modified_base 22: mod_base = OTHER; note = 2'-O-methylcytidine-3'-phosphorothioate
  modified_base 23: mod_base = OTHER; note = 2'-O-methyluridine
ttttgaatgaatacttcctagct

SEQ ID NO: 616 - RNA, 23 nt, synthetic construct
  source 1..23: mol_type = other RNA
  modified_base 4: mod_base = OTHER; note = 5'-methyluridine-3'-phosphate
  modified_base 11: mod_base = OTHER; note = 5'-methyluridine-3'-phosphate
  modified_base 13: mod_base = OTHER; note = 5'-methyluridine-3'-phosphate
  modified_base 14: mod_base = OTHER; note = 5'-methyluridine-3'-phosphate
  modified_base 17: mod_base = OTHER; note = 5'-methyluridine-3'-phosphate
  modified_base 18: mod_base = OTHER; note = 5'-methyluridine-3'-phosphate
agctaggaagtattcattcaaaa

SEQ ID NO: 617 - RNA, 21 nt, synthetic construct
  source 1..21: mol_type = other RNA
  modified_base 1: mod_base = OTHER; note = 2'-O-methyluridine-3'-phosphorothioate
  modified_base 2: mod_base = OTHER; note = 2'-O-methyluridine-3'-phosphorothioate
  modified_base 3: mod_base = OTHER; note = 2'-O-methylcytidine-3'-phosphate
  modified_base 4: mod_base = OTHER; note = 2'-O-methyladenosine-3'-phosphate
  modified_base 5: mod_base = OTHER; note = 2'-O-methyladenosine-3'-phosphate
  modified_base 6: mod_base = OTHER; note = 2'-O-methyladenosine-3'-phosphate
  modified_base 7: mod_base = OTHER; note = 2'-deoxy-2'-fluorocytidine-3'-phosphate
  modified_base 8: mod_base = OTHER; note = 2'-O-methyluridine-3'-phosphate
  modified_base 9: mod_base = OTHER; note = 2'-deoxy-2'-fluorouridine-3'-phosphate
  modified_base 10: mod_base = OTHER; note = 2'-deoxy-2'-fluoroguanosine-3'-phosphate
  modified_base 11: mod_base = OTHER; note = 2'-deoxy-2'-fluoroadenosine-3'-phosphate
  modified_base 12: mod_base = OTHER; note = 2'-O-methyladenosine-3'-phosphate
  modified_base 13: mod_base = OTHER; note = 2'-O-methyluridine-3'-phosphate
  modified_base 14: mod_base = OTHER; note = 2'-O-methyladenosine-3'-phosphate
  modified_base 15: mod_base = OTHER; note = 2'-O-methyluridine-3'-phosphate
  modified_base 16: mod_base = OTHER; note = 2'-O-methyluridine-3'-phosphate
  modified_base 17: mod_base = OTHER; note = 2'-O-methylcytidine-3'-phosphate
  modified_base 18: mod_base = OTHER; note = 2'-O-methyluridine-3'-phosphate
  modified_base 19: mod_base = OTHER; note = 2'-O-methyluridine-3'-phosphate
  modified_base 20: mod_base = OTHER; note = 2'-O-methylcytidine-3'-phosphate
  modified_base 21: mod_base = OTHER; note = 2'-O-methyladenosine-3'-phosphate ((2S,4R)-1-[29-[[2-(acetylamino)-2-deoxy-beta-D-galactopyra nosyl]oxy]-14,14-bis[[3-[[3-[[5-[[2-(acetylamino)-2-deoxy-b eta-D-galactopyranosyl]oxy]-1-oxopentyl]amino]propyl]amino] -3-oxopropoxy]methyl]-1,12,19,25-tetraoxo-16-oxa-13,20,24-t riazanonacos-1-yl]-4-hydroxy-2-pyrrolidinyl)methyl ester
ttcaaacttgaatattcttca

SEQ ID NO: 618 - RNA, 23 nt, synthetic construct
  source 1..23: mol_type = other RNA
  modified_base 1: mod_base = OTHER; note = 2'-O-methyluridine-3'-phosphorothioate
  modified_base 2: mod_base = OTHER; note = 2'-deoxy-2'-fluoroguanosine-3'-phosphorothioate
  modified_base 3: mod_base = OTHER; note = 2'-O-methyladenosine-3'-phosphate
  modified_base 4: mod_base = OTHER; note = 2'-O-methyladenosine-3'-phosphate
  modified_base 5: mod_base = OTHER; note = 2'-O-methylguanosine-3'-phosphate
  modified_base 6: mod_base = OTHER; note = 2'-deoxy-2'-fluoroadenosine-3'-phosphate
  modified_base 7: mod_base = OTHER; note = 2'-O-methyladenosine-3'-phosphate
  modified_base 8: mod_base = OTHER; note = 2'-deoxy-2'-fluorouridine-3'-phosphate
  modified_base 9: mod_base = OTHER; note = 2'-deoxy-2'-fluoroadenosine-3'-phosphate
  modified_base 10: mod_base = OTHER; note = 2'-O-methyluridine-3'-phosphate
  modified_base 11: mod_base = OTHER; note = 2'-O-methyluridine-3'-phosphate
  modified_base 12: mod_base = OTHER; note = 2'-O-methylcytidine-3'-phosphate
  modified_base 13: mod_base = OTHER; note = 2'-O-methyladenosine-3'-phosphate
  modified_base 14: mod_base = OTHER; note = 2'-deoxy-2'-fluoroadenosine-3'-phosphate
  modified_base 15: mod_base = OTHER; note = 2'-O-methylguanosine-3'-phosphate
  modified_base 16: mod_base = OTHER; note = 2'-deoxy-2'-fluorouridine-3'-phosphate
  modified_base 17: mod_base = OTHER; note = 2'-O-methyluridine-3'-phosphate
  modified_base 18: mod_base = OTHER; note = 2'-O-methyluridine-3'-phosphate
  modified_base 19: mod_base = OTHER; note = 2'-O-methylguanosine-3'-phosphate
  modified_base 20: mod_base = OTHER; note = 2'-O-methyladenosine-3'-phosphate
  modified_base 21: mod_base = OTHER; note = 2'-O-methyladenosine-3'-phosphorothioate
  modified_base 22: mod_base = OTHER; note = 2'-O-methyluridine-3'-phosphorothioate
  modified_base 23: mod_base = OTHER; note = 2'-O-methylguanosine
tgaagaatattcaagtttgaatg

SEQ ID NO: 619 - RNA, 23 nt, synthetic construct
  source 1..23: mol_type = other RNA
  modified_base 3: mod_base = OTHER; note = 5'-methyluridine-3'-phosphate
  modified_base 4: mod_base = OTHER; note = 5'-methyluridine-3'-phosphate
  modified_base 10: mod_base = OTHER; note = 5'-methyluridine-3'-phosphate
  modified_base 11: mod_base = OTHER; note = 5'-methyluridine-3'-phosphate
  modified_base 15: mod_base = OTHER; note = 5'-methyluridine-3'-phosphate
  modified_base 17: mod_base = OTHER; note = 5'-methyluridine-3'-phosphate
  modified_base 18: mod_base = OTHER; note = 5'-methyluridine-3'-phosphate
  modified_base 20: mod_base = OTHER; note = 5'-methyluridine-3'-phosphate
  modified_base 21: mod_base = OTHER; note = 5'-methyluridine-3'-phosphate
cattcaaacttgaatattcttca

SEQ ID NO: 620 - RNA, 21 nt, synthetic construct
  source 1..21: mol_type = other RNA
  modified_base 1: mod_base = OTHER; note = 2'-O-methyladenosine-3'-phosphorothioate
  modified_base 2: mod_base = OTHER; note = 2'-O-methyluridine-3'-phosphorothioate
  modified_base 3: mod_base = OTHER; note = 2'-O-methylguanosine-3'-phosphate
  modified_base 4: mod_base = OTHER; note = 2'-O-methylguanosine-3'-phosphate
  modified_base 5: mod_base = OTHER; note = 2'-O-methyluridine-3'-phosphate
  modified_base 6: mod_base = OTHER; note = 2'-O-methylcytidine-3'-phosphate
  modified_base 7: mod_base = OTHER; note = 2'-deoxy-2'-fluoroadenosine-3'-phosphate
  modified_base 8: mod_base = OTHER; note = 2'-O-methylguanosine-3'-phosphate
  modified_base 9: mod_base = OTHER; note = 2'-deoxy-2'-fluoroadenosine-3'-phosphate
  modified_base 10: mod_base = OTHER; note = 2'-O-methyluridine-3'-phosphate
  modified_base 11: mod_base = OTHER; note = 2'-deoxy-2'-fluorocytidine-3'-phosphate
  modified_base 12: mod_base = OTHER; note = 2'-O-methyluridine-3'-phosphate
  modified_base 13: mod_base = OTHER; note = 2'-O-methyluridine-3'-phosphate
  modified_base 14: mod_base = OTHER; note = 2'-O-methylcytidine-3'-phosphate
  modified_base 15: mod_base = OTHER; note = 2'-O-methyladenosine-3'-phosphate
  modified_base 16: mod_base = OTHER; note = 2'-O-methyladenosine-3'-phosphate
  modified_base 17: mod_base = OTHER; note = 2'-O-methyladenosine-3'-phosphate
  modified_base 18: mod_base = OTHER; note = 2'-O-methyladenosine-3'-phosphate
  modified_base 19: mod_base = OTHER; note = 2'-O-methyluridine-3'-phosphate
  modified_base 20: mod_base = OTHER; note = 2'-O-methyladenosine-3'-phosphate
  modified_base 21: mod_base = OTHER; note = 2'-O-methyladenosine-3'-phosphate ((2S,4R)-1-[29-[[2-(acetylamino)-2-deoxy-beta-D-galactopyra nosyl]oxy]-14,14-bis[[3-[[3-[[5-[[2-(acetylamino)-2-deoxy-b eta-D-galactopyranosyl]oxy]-1-oxopentyl]amino]propyl]amino] -3-oxopropoxy]methyl]-1,12,19,25-tetraoxo-16-oxa-13,20,24-t riazanonacos-1-yl]-4-hydroxy-2-pyrrolidinyl)methyl ester
atggtcagatcttcaaaataa

SEQ ID NO: 621 - RNA, 23 nt, synthetic construct
  source 1..23: mol_type = other RNA
  modified_base 1: mod_base = OTHER; note = 2'-O-methyluridine-3'-phosphorothioate
  modified_base 2: mod_base = OTHER; note = 2'-deoxy-2'-fluorouridine-3'-phosphorothioate
  modified_base 3: mod_base = OTHER; note = 2'-O-methyladenosine-3'-phosphate
  modified_base 4: mod_base = OTHER; note = 2'-O-methyluridine-3'-phosphate
  modified_base 5: mod_base = OTHER; note = 2'-O-methyluridine-3'-phosphate
  modified_base 6: mod_base = OTHER; note = 2'-deoxy-2'-fluorouridine-3'-phosphate
  modified_base 7: mod_base = OTHER; note = 2'-O-methyluridine-3'-phosphate
  modified_base 8: mod_base = OTHER; note = 2'-deoxy-2'-fluoroguanosine-3'-phosphate
  modified_base 9: mod_base = OTHER; note = 2'-deoxy-2'-fluoroadenosine-3'-phosphate
  modified_base 10: mod_base = OTHER; note = 2'-O-methyladenosine-3'-phosphate
  modified_base 11: mod_base = OTHER; note = 2'-O-methylguanosine-3'-phosphate
  modified_base 12: mod_base = OTHER; note = 2'-deoxy-2'-fluoroadenosine-3'-phosphate
  modified_base 13: mod_base = OTHER; note = 2'-O-methyluridine-3'-phosphate
  modified_base 14: mod_base = OTHER; note = 2'-deoxy-2'-fluorocytidine-3'-phosphate
  modified_base 15: mod_base = OTHER; note = 2'-O-methyluridine-3'-phosphate
  modified_base 16: mod_base = OTHER; note = 2'-deoxy-2'-fluoroguanosine-3'-phosphate
  modified_base 17: mod_base = OTHER; note = 2'-O-methyladenosine-3'-phosphate
  modified_base 18: mod_base = OTHER; note = 2'-O-methylcytidine-3'-phosphate
  modified_base 19: mod_base = OTHER; note = 2'-O-methylcytidine-3'-phosphate
  modified_base 20: mod_base = OTHER; note = 2'-O-methyladenosine-3'-phosphate
  modified_base 21: mod_base = OTHER; note = 2'-O-methyluridine-3'-phosphorothioate
  modified_base 22: mod_base = OTHER; note = 2'-O-methyluridine-3'-phosphorothioate
  modified_base 23: mod_base = OTHER; note = 2'-O-methylguanosine
ttattttgaagatctgaccattg

SEQ ID NO: 622 - RNA, 23 nt, synthetic construct
  source 1..23: mol_type = other RNA
  modified_base 4: mod_base = OTHER; note = 5'-methyluridine-3'-phosphate
  modified_base 7: mod_base = OTHER; note = 5'-methyluridine-3'-phosphate
  modified_base 12: mod_base = OTHER; note = 5'-methyluridine-3'-phosphate
  modified_base 14: mod_base = OTHER; note = 5'-methyluridine-3'-phosphate
  modified_base 15: mod_base = OTHER; note = 5'-methyluridine-3'-phosphate
  modified_base 21: mod_base = OTHER; note = 5'-methyluridine-3'-phosphate
caatggtcagatcttcaaaataa

SEQ ID NO: 623 - RNA, 21 nt, synthetic construct
  source 1..21: mol_type = other RNA
  modified_base 1: mod_base = OTHER; note = 2'-O-methylcytidine-3'-phosphorothioate
  modified_base 2: mod_base = OTHER; note = 2'-O-methyladenosine-3'-phosphorothioate
  modified_base 3: mod_base = OTHER; note = 2'-O-methyluridine-3'-phosphate
  modified_base 4: mod_base = OTHER; note = 2'-O-methylguanosine-3'-phosphate
  modified_base 5: mod_base = OTHER; note = 2'-O-methyluridine-3'-phosphate
  modified_base 6: mod_base = OTHER; note = 2'-deoxy-2'-fluoroguanosine-3'-phosphate
  modified_base 7: mod_base = OTHER; note = 2'-deoxy-2'-fluorocytidine-3'-phosphate
  modified_base 8: mod_base = OTHER; note = 2'-O-methyladenosine-3'-phosphate
  modified_base 9: mod_base = OTHER; note = 2'-deoxy-2'-fluorocytidine-3'-phosphate
  modified_base 10: mod_base = OTHER; note = 2'-O-methyladenosine-3'-phosphate
  modified_base 11: mod_base = OTHER; note = 2'-deoxy-2'-fluorouridine-3'-phosphate
  modified_base 12: mod_base = OTHER; note = 2'-deoxy-2'-fluorouridine-3'-phosphate
  modified_base 13: mod_base = OTHER; note = 2'-O-methylguanosine-3'-phosphate
  modified_base 14: mod_base = OTHER; note = 2'-O-methyladenosine-3'-phosphate
  modified_base 15: mod_base = OTHER; note = 2'-O-methyladenosine-3'-phosphate
  modified_base 16: mod_base = OTHER; note = 2'-O-methyladenosine-3'-phosphate
  modified_base 17: mod_base = OTHER; note = 2'-O-methyladenosine-3'-phosphate
  modified_base 18: mod_base = OTHER; note = 2'-O-methylcytidine-3'-phosphate
  modified_base 19: mod_base = OTHER; note = 2'-deoxy-2'-fluorouridine-3'-phosphate
  modified_base 20: mod_base = OTHER; note = 2'-O-methylguanosine-3'-phosphate
  modified_base 21: mod_base = OTHER; note = 2'-deoxy-2'-fluorouridine-3'-phosphate ((2S,4R)-1-[29-[[2-(acetylamino)-2-deoxy-beta-D-galactopyra nosyl]oxy]-14,14-bis[[3-[[3-[[5-[[2-(acetylamino)-2-deoxy-b eta-D-galactopyranosyl]oxy]-1-oxopentyl]amino]propyl]amino] -3-oxopropoxy]methyl]-1,12,19,25-tetraoxo-16-oxa-13,20,24-t riazanonacos-1-yl]-4-hydroxy-2-pyrrolidinyl)methyl ester
catgtgcacattgaaaactgt

SEQ ID NO: 624 - RNA, 23 nt, synthetic construct
  source 1..23: mol_type = other RNA
  modified_base 1: mod_base = OTHER; note = 2'-O-methyladenosine-3'-phosphorothioate
  modified_base 2: mod_base = OTHER; note = 2'-deoxy-2'-fluorocytidine-3'-phosphorothioate
  modified_base 3: mod_base = OTHER; note = 2'-O-methyladenosine-3'-phosphate
  modified_base 4: mod_base = OTHER; note = 2'-O-methylguanosine-3'-phosphate
  modified_base 5: mod_base = OTHER; note = 2'-deoxy-2'-fluorouridine-3'-phosphate
  modified_base 6: mod_base = OTHER; note = 2'-deoxy-2'-fluorouridine-3'-phosphate
  modified_base 7: mod_base = OTHER; note = 2'-O-methyluridine-3'-phosphate
  modified_base 8: mod_base = OTHER; note = 2'-deoxy-2'-fluorouridine-3'-phosphate
  modified_base 9: mod_base = OTHER; note = 2'-O-methylcytidine-3'-phosphate
  modified_base 10: mod_base = OTHER; note = 2'-O-methyladenosine-3'-phosphate
  modified_base 11: mod_base = OTHER; note = 2'-O-methyladenosine-3'-phosphate
  modified_base 12: mod_base = OTHER; note = 2'-deoxy-2'-fluorouridine-3'-phosphate
  modified_base 13: mod_base = OTHER; note = 2'-O-methylguanosine-3'-phosphate
  modified_base 14: mod_base = OTHER; note = 2'-deoxy-2'-fluorouridine-3'-phosphate
  modified_base 15: mod_base = OTHER; note = 2'-O-methylguanosine-3'-phosphate
  modified_base 16: mod_base = OTHER; note = 2'-deoxy-2'-fluorocytidine-3'-phosphate
  modified_base 17: mod_base = OTHER; note = 2'-O-methyladenosine-3'-phosphate
  modified_base 18: mod_base = OTHER; note = 2'-O-methylcytidine-3'-phosphate
  modified_base 19: mod_base = OTHER; note = 2'-O-methyladenosine-3'-phosphate
  modified_base 20: mod_base = OTHER; note = 2'-O-methyluridine-3'-phosphate
  modified_base 21: mod_base = OTHER; note = 2'-O-methylguanosine-3'-phosphorothioate
  modified_base 22: mod_base = OTHER; note = 2'-O-methylcytidine-3'-phosphorothioate
  modified_base 23: mod_base = OTHER; note = 2'-O-methylguanosine
acagttttcaatgtgcacatgcg

SEQ ID NO: 625 - RNA, 23 nt, synthetic construct
  source 1..23: mol_type = other RNA
  modified_base 5: mod_base = OTHER; note = 5'-methyluridine-3'-phosphate
  modified_base 7: mod_base = OTHER; note = 5'-methyluridine-3'-phosphate
  modified_base 13: mod_base = OTHER; note = 5'-methyluridine-3'-phosphate
  modified_base 14: mod_base = OTHER; note = 5'-methyluridine-3'-phosphate
  modified_base 21: mod_base = OTHER; note = 5'-methyluridine-3'-phosphate
  modified_base 23: mod_base = OTHER; note = 5'-methyluridine
cgcatgtgcacattgaaaactgt

SEQ ID NO: 626 - RNA, 21 nt, synthetic construct
  source 1..21: mol_type = other RNA
  modified_base 1: mod_base = OTHER; note = 2'-O-methyladenosine-3'-phosphorothioate
  modified_base 2: mod_base = OTHER; note = 2'-O-methyluridine-3'-phosphorothioate
  modified_base 3: mod_base = OTHER; note = 2'-O-methylguanosine-3'-phosphate
  modified_base 4: mod_base = OTHER; note = 2'-O-methylguanosine-3'-phosphate
  modified_base 5: mod_base = OTHER; note = 2'-O-methyluridine-3'-phosphate
  modified_base 6: mod_base = OTHER; note = 2'-O-methylcytidine-3'-phosphate
  modified_base 7: mod_base = OTHER; note = 2'-deoxy-2'-fluoroadenosine-3'-phosphate
  modified_base 8: mod_base = OTHER; note = 2'-O-methylguanosine-3'-phosphate
  modified_base 9: mod_base = OTHER; note = 2'-deoxy-2'-fluoroadenosine-3'-phosphate
  modified_base 10: mod_base = OTHER; note = 2'-O-methyluridine-3'-phosphate
  modified_base 11: mod_base = OTHER; note = 2'-deoxy-2'-fluorocytidine-3'-phosphate
  modified_base 12: mod_base = OTHER; note = 2'-O-methyluridine-3'-phosphate
  modified_base 13: mod_base = OTHER; note = 2'-O-methyluridine-3'-phosphate
  modified_base 14: mod_base = OTHER; note = 2'-O-methylcytidine-3'-phosphate
  modified_base 15: mod_base = OTHER; note = 2'-O-methyladenosine-3'-phosphate
  modified_base 16: mod_base = OTHER; note = 2'-O-methyladenosine-3'-phosphate
  modified_base 17: mod_base = OTHER; note = 2'-O-methyladenosine-3'-phosphate
  modified_base 18: mod_base = OTHER; note = 2'-O-methyladenosine-3'-phosphate
  modified_base 19: mod_base = OTHER; note = 2'-O-methyluridine-3'-phosphate
  modified_base 20: mod_base = OTHER; note = 2'-O-methyladenosine-3'-phosphate
  modified_base 21: mod_base = OTHER; note = 2'-O-methyladenosine-3'-phosphate ((2S,4R)-1-[29-[[2-(acetylamino)-2-deoxy-beta-D-galactopyra nosyl]oxy]-14,14-bis[[3-[[3-[[5-[[2-(acetylamino)-2-deoxy-b eta-D-galactopyranosyl]oxy]-1-oxopentyl]amino]propyl]amino] -3-oxopropoxy]methyl]-1,12,19,25-tetraoxo-16-oxa-13,20,24-t riazanonacos-1-yl]-4-hydroxy-2-pyrrolidinyl)methyl ester
atggtcagatcttcaaaataa

SEQ ID NO: 627 - RNA, 23 nt, synthetic construct
  source 1..23: mol_type = other RNA
  modified_base 1: mod_base = OTHER; note = 2'-O-methyluridine-3'-phosphorothioate
  modified_base 2: mod_base = OTHER; note = 2'-deoxy-2'-fluorouridine-3'-phosphorothioate
  modified_base 3: mod_base = OTHER; note = 2'-O-methyladenosine-3'-phosphate
  modified_base 4: mod_base = OTHER; note = 2'-O-methyluridine-3'-phosphate
  modified_base 5: mod_base = OTHER; note = 2'-O-methyluridine-3'-phosphate
  modified_base 6: mod_base = OTHER; note = Thymidine-glycol nucleic acid (GNA), S-Isomer
  modified_base 7: mod_base = OTHER; note = 2'-O-methyluridine-3'-phosphate
  modified_base 8: mod_base = OTHER; note = 2'-O-methylguanosine-3'-phosphate
  modified_base 9: mod_base = OTHER; note = 2'-O-methyladenosine-3'-phosphate
  modified_base 10: mod_base = OTHER; note = 2'-O-methyladenosine-3'-phosphate
  modified_base 11: mod_base = OTHER; note = 2'-O-methylguanosine-3'-phosphate
  modified_base 12: mod_base = OTHER; note = 2'-deoxy-2'-fluoroadenosine-3'-phosphate
  modified_base 13: mod_base = OTHER; note = 2'-O-methyluridine-3'-phosphate
  modified_base 14: mod_base = OTHER; note = 2'-deoxy-2'-fluorocytidine-3'-phosphate
  modified_base 15: mod_base = OTHER; note = 2'-O-methyluridine-3'-phosphate
  modified_base 16: mod_base = OTHER; note = 2'-deoxy-2'-fluoroguanosine-3'-phosphate
  modified_base 17: mod_base = OTHER; note = 2'-O-methyladenosine-3'-phosphate
  modified_base 18: mod_base = OTHER; note = 2'-O-methylcytidine-3'-phosphate
  modified_base 19: mod_base = OTHER; note = 2'-O-methylcytidine-3'-phosphate
  modified_base 20: mod_base = OTHER; note = 2'-O-methyladenosine-3'-phosphate
  modified_base 21: mod_base = OTHER; note = 2'-O-methyluridine-3'-phosphorothioate
  modified_base 22: mod_base = OTHER; note = 2'-O-methyluridine-3'-phosphorothioate
  modified_base 23: mod_base = OTHER; note = 2'-O-methylguanosine
ttattttgaagatctgaccattg

SEQ ID NO: 628 - RNA, 23 nt, synthetic construct
  source 1..23: mol_type = other RNA
  modified_base 4: mod_base = OTHER; note = 5'-methyluridine-3'-phosphate
  modified_base 7: mod_base = OTHER; note = 5'-methyluridine-3'-phosphate
  modified_base 12: mod_base = OTHER; note = 5'-methyluridine-3'-phosphate
  modified_base 14: mod_base = OTHER; note = 5'-methyluridine-3'-phosphate
  modified_base 15: mod_base = OTHER; note = 5'-methyluridine-3'-phosphate
  modified_base 21: mod_base = OTHER; note = 5'-methyluridine-3'-phosphate
caatggtcagatcttcaaaataa

SEQ ID NO: 629 - RNA, 21 nt, synthetic construct
  source 1..21: mol_type = other RNA
  modified_base 1: mod_base = OTHER; note = 2'-O-methyladenosine-3'-phosphorothioate
  modified_base 2: mod_base = OTHER; note = 2'-O-methyluridine-3'-phosphorothioate
  modified_base 3: mod_base = OTHER; note = 2'-O-methylguanosine-3'-phosphate
  modified_base 4: mod_base = OTHER; note = 2'-O-methylguanosine-3'-phosphate
  modified_base 5: mod_base = OTHER; note = 2'-O-methyluridine-3'-phosphate
  modified_base 6: mod_base = OTHER; note = 2'-deoxy-2'-fluorocytidine-3'-phosphate
  modified_base 7: mod_base = OTHER; note = 2'-deoxy-2'-fluoroadenosine-3'-phosphate
  modified_base 8: mod_base = OTHER; note = 2'-O-methylguanosine-3'-phosphate
  modified_base 9: mod_base = OTHER; note = 2'-deoxy-2'-fluoroadenosine-3'-phosphate
  modified_base 10: mod_base = OTHER; note = 2'-O-methyluridine-3'-phosphate
  modified_base 11: mod_base = OTHER; note = 2'-deoxy-2'-fluorocytidine-3'-phosphate
  modified_base 12: mod_base = OTHER; note = 2'-deoxy-2'-fluorouridine-3'-phosphate
  modified_base 13: mod_base = OTHER; note = 2'-O-hexadecyl-uridine-3'-phosphate
  modified_base 14: mod_base = OTHER; note = 2'-O-methylcytidine-3'-phosphate
  modified_base 15: mod_base = OTHER; note = 2'-O-methyladenosine-3'-phosphate
  modified_base 16: mod_base = OTHER; note = 2'-O-methyladenosine-3'-phosphate
  modified_base 17: mod_base = OTHER; note = 2'-O-methyladenosine-3'-phosphate
  modified_base 18: mod_base = OTHER; note = 2'-O-methyladenosine-3'-phosphate
  modified_base 19: mod_base = OTHER; note = 2'-deoxy-2'-fluorouridine-3'-phosphate
  modified_base 20: mod_base = OTHER; note = 2'-O-methyladenosine-3'-phosphate
  modified_base 21: mod_base = OTHER; note = 2'-deoxy-2'-fluoroadenosine-3'-phosphate ((2S,4R)-1-[29-[[2-(acetylamino)-2-deoxy-beta-D-galactopyra nosyl]oxy]-14,14-bis[[3-[[3-[[5-[[2-(acetylamino)-2-deoxy-b eta-D-galactopyranosyl]oxy]-1-oxopentyl]amino]propyl]amino] -3-oxopropoxy]methyl]-1,12,19,25-tetraoxo-16-oxa-13,20,24-t riazanonacos-1-yl]-4-hydroxy-2-pyrrolidinyl)methyl ester
atggtcagatcttcaaaataa

SEQ ID NO: 630 - RNA, 23 nt, synthetic construct
  source 1..23: mol_type = other RNA
  modified_base 1: mod_base = OTHER; note = 2'-O-methyluridine-3'-phosphorothioate
  modified_base 2: mod_base = OTHER; note = 2'-deoxy-2'-fluorouridine-3'-phosphorothioate
  modified_base 3: mod_base = OTHER; note = 2'-O-methyladenosine-3'-phosphate
  modified_base 4: mod_base = OTHER; note = 2'-O-methyluridine-3'-phosphate
  modified_base 5: mod_base = OTHER; note = 2'-deoxy-2'-fluorouridine-3'-phosphate
  modified_base 6: mod_base = OTHER; note = 2'-deoxy-2'-fluorouridine-3'-phosphate
  modified_base 7: mod_base = OTHER; note = 2'-O-methyluridine-3'-phosphate
  modified_base 8: mod_base = OTHER; note = 2'-deoxy-2'-fluoroguanosine-3'-phosphate
  modified_base 9: mod_base = OTHER; note = 2'-O-methyladenosine-3'-phosphate
  modified_base 10: mod_base = OTHER; note = 2'-O-methyladenosine-3'-phosphate
  modified_base 11: mod_base = OTHER; note = 2'-O-methylguanosine-3'-phosphate
  modified_base 12: mod_base = OTHER; note = 2'-deoxy-2'-fluoroadenosine-3'-phosphate
  modified_base 13: mod_base = OTHER; note = 2'-O-methyluridine-3'-phosphate
  modified_base 14: mod_base = OTHER; note = 2'-deoxy-2'-fluorocytidine-3'-phosphate
  modified_base 15: mod_base = OTHER; note = 2'-O-methyluridine-3'-phosphate
  modified_base 16: mod_base = OTHER; note = 2'-deoxy-2'-fluoroguanosine-3'-phosphate
  modified_base 17: mod_base = OTHER; note = 2'-O-methyladenosine-3'-phosphate
  modified_base 18: mod_base = OTHER; note = 2'-O-methylcytidine-3'-phosphate
  modified_base 19: mod_base = OTHER; note = 2'-O-methylcytidine-3'-phosphate
  modified_base 20: mod_base = OTHER; note = 2'-O-methyladenosine-3'-phosphate
  modified_base 21: mod_base = OTHER; note = 2'-O-methyluridine-3'-phosphorothioate
  modified_base 22: mod_base = OTHER; note = 2'-O-methyluridine-3'-phosphorothioate
  modified_base 23: mod_base = OTHER; note = 2'-O-methylguanosine
ttattttgaagatctgaccattg

SEQ ID NO: 631 - RNA, 23 nt, synthetic construct
  source 1..23: mol_type = other RNA
  modified_base 4: mod_base = OTHER; note = 5'-methyluridine-3'-phosphate
  modified_base 7: mod_base = OTHER; note = 5'-methyluridine-3'-phosphate
  modified_base 12: mod_base = OTHER; note = 5'-methyluridine-3'-phosphate
  modified_base 14: mod_base = OTHER; note = 5'-methyluridine-3'-phosphate
  modified_base 15: mod_base = OTHER; note = 5'-methyluridine-3'-phosphate
  modified_base 21: mod_base = OTHER; note = 5'-methyluridine-3'-phosphate
caatggtcagatcttcaaaataa

SEQ ID NO: 632 - RNA, 21 nt, synthetic construct
  source 1..21: mol_type = other RNA
  modified_base 1: mod_base = OTHER; note = 2'-O-methyladenosine-3'-phosphorothioate
  modified_base 2: mod_base = OTHER; note = 2'-O-methyladenosine-3'-phosphorothioate
  modified_base 3: mod_base = OTHER; note = 2'-O-methyluridine-3'-phosphate
  modified_base 4: mod_base = OTHER; note = 2'-O-methyladenosine-3'-phosphate
  modified_base 5: mod_base = OTHER; note = 2'-O-methylguanosine-3'-phosphate
  modified_base 6: mod_base = OTHER; note = 2'-O-methylcytidine-3'-phosphate
  modified_base 7: mod_base = OTHER; note = 2'-deoxy-2'-fluorouridine-3'-phosphate
  modified_base 8: mod_base = OTHER; note = 2'-O-methyladenosine-3'-phosphate
  modified_base 9: mod_base = OTHER; note = 2'-deoxy-2'-fluoroguanosine-3'-phosphate
  modified_base 10: mod_base = OTHER; note = 2'-deoxy-2'-fluoroguanosine-3'-phosphate
  modified_base 11: mod_base = OTHER; note = 2'-deoxy-2'-fluoroadenosine-3'-phosphate
  modified_base 12: mod_base = OTHER; note = 2'-O-methyladenosine-3'-phosphate
  modified_base 13: mod_base = OTHER; note = 2'-O-methylguanosine-3'-phosphate
  modified_base 14: mod_base = OTHER; note = 2'-O-methyluridine-3'-phosphate
  modified_base 15: mod_base = OTHER; note = 2'-O-methyladenosine-3'-phosphate
  modified_base 16: mod_base = OTHER; note = 2'-O-methyluridine-3'-phosphate
  modified_base 17: mod_base = OTHER; note = 2'-O-methyluridine-3'-phosphate
  modified_base 18: mod_base = OTHER; note = 2'-O-methylcytidine-3'-phosphate
  modified_base 19: mod_base = OTHER; note = 2'-O-methyladenosine-3'-phosphate
  modified_base 20: mod_base = OTHER; note = 2'-O-methyluridine-3'-phosphate
  modified_base 21: mod_base = OTHER; note = 2'-O-methyluridine-3'-phosphate ((2S,4R)-1-[29-[[2-(acetylamino)-2-deoxy-beta-D-galactopyra nosyl]oxy]-14,14-bis[[3-[[3-[[5-[[2-(acetylamino)-2-deoxy-b eta-D-galactopyranosyl]oxy]-1-oxopentyl]amino]propyl]amino] -3-oxopropoxy]methyl]-1,12,19,25-tetraoxo-16-oxa-13,20,24-t riazanonacos-1-yl]-4-hydroxy-2-pyrrolidinyl)methyl ester
aatagctaggaagtattcatt

SEQ ID NO: 633 - RNA, 23 nt, synthetic construct
  source 1..23: mol_type = other RNA
  modified_base 1: mod_base = OTHER; note = 2'-O-methyladenosine-3'-phosphorothioate
  modified_base 2: mod_base = OTHER; note = 2'-deoxy-2'-fluoroadenosine-3'-phosphorothioate
  modified_base 3: mod_base = OTHER; note = 2'-O-methyluridine-3'-phosphate
  modified_base 4: mod_base = OTHER; note = 2'-O-methylguanosine-3'-phosphate
  modified_base 5: mod_base = OTHER; note = 2'-O-methyladenosine-3'-phosphate
  modified_base 6: mod_base = OTHER; note = 2'-deoxy-2'-fluoroadenosine-3'-phosphate
  modified_base 7: mod_base = OTHER; note = 2'-O-methyluridine-3'-phosphate
  modified_base 8: mod_base = OTHER; note = 2'-deoxy-2'-fluoroadenosine-3'-phosphate
  modified_base 9: mod_base = OTHER; note = 2'-deoxy-2'-fluorocytidine-3'-phosphate
  modified_base 10: mod_base = OTHER; note = 2'-O-methyluridine-3'-phosphate
  modified_base 11: mod_base = OTHER; note = 2'-O-methyluridine-3'-phosphate
  modified_base 12: mod_base = OTHER; note = 2'-O-methylcytidine-3'-phosphate
  modified_base 13: mod_base = OTHER; note = 2'-O-methylcytidine-3'-phosphate
  modified_base 14: mod_base = OTHER; note = 2'-deoxy-2'-fluorouridine-3'-phosphate
  modified_base 15: mod_base = OTHER; note = 2'-O-methyladenosine-3'-phosphate
  modified_base 16: mod_base = OTHER; note = 2'-deoxy-2'-fluoroguanosine-3'-phosphate
  modified_base 17: mod_base = OTHER; note = 2'-O-methylcytidine-3'-phosphate
  modified_base 18: mod_base = OTHER; note = 2'-O-methyluridine-3'-phosphate
  modified_base 19: mod_base = OTHER; note = 2'-O-methyladenosine-3'-phosphate
  modified_base 20: mod_base = OTHER; note = 2'-O-methyluridine-3'-phosphate
  modified_base 21: mod_base = OTHER; note = 2'-O-methyluridine-3'-phosphorothioate
  modified_base 22: mod_base = OTHER; note = 2'-O-methyluridine-3'-phosphorothioate
  modified_base 23: mod_base = OTHER; note = 2'-O-methyladenosine
aatgaatacttcctagctattta

SEQ ID NO: 634 - RNA, 23 nt, synthetic construct
  source 1..23: mol_type = other RNA
  modified_base 1: mod_base = OTHER; note = 5'-methyluridine-3'-phosphate
  modified_base 5: mod_base = OTHER; note = 5'-methyluridine-3'-phosphate
  modified_base 9: mod_base = OTHER; note = 5'-methyluridine-3'-phosphate
  modified_base 16: mod_base = OTHER; note = 5'-methyluridine-3'-phosphate
  modified_base 18: mod_base = OTHER; note = 5'-methyluridine-3'-phosphate
  modified_base 19: mod_base = OTHER; note = 5'-methyluridine-3'-phosphate
  modified_base 22: mod_base = OTHER; note = 5'-methyluridine-3'-phosphate
  modified_base 23: mod_base = OTHER; note = 5'-methyluridine
taaatagctaggaagtattcatt

SEQ ID NO: 635 - RNA, 21 nt, synthetic construct
  source 1..21: mol_type = other RNA
  modified_base 1: mod_base = OTHER; note = 2'-O-methyladenosine-3'-phosphorothioate
  modified_base 2: mod_base = OTHER; note = 2'-O-methylguanosine-3'-phosphorothioate
  modified_base 3: mod_base = OTHER; note = 2'-O-methyluridine-3'-phosphate
  modified_base 4: mod_base = OTHER; note = 2'-O-methyladenosine-3'-phosphate
  modified_base 5: mod_base = OTHER; note = 2'-O-methyluridine-3'-phosphate
  modified_base 6: mod_base = OTHER; note = 2'-O-methyluridine-3'-phosphate
  modified_base 7: mod_base = OTHER; note = 2'-deoxy-2'-fluorocytidine-3'-phosphate
  modified_base 8: mod_base = OTHER; note = 2'-O-methyladenosine-3'-phosphate
  modified_base 9: mod_base = OTHER; note = 2'-deoxy-2'-fluorouridine-3'-phosphate
  modified_base 10: mod_base = OTHER; note = 2'-deoxy-2'-fluorouridine-3'-phosphate
  modified_base 11: mod_base = OTHER; note = 2'-deoxy-2'-fluorocytidine-3'-phosphate
  modified_base 12: mod_base = OTHER; note = 2'-O-methyladenosine-3'-phosphate
  modified_base 13: mod_base = OTHER; note = 2'-O-methyladenosine-3'-phosphate
  modified_base 14: mod_base = OTHER; note = 2'-O-methyladenosine-3'-phosphate
  modified_base 15: mod_base = OTHER; note = 2'-O-methylcytidine-3'-phosphate
  modified_base 16: mod_base = OTHER; note = 2'-O-methyluridine-3'-phosphate
  modified_base 17: mod_base = OTHER; note = 2'-O-methyluridine-3'-phosphate
  modified_base 18: mod_base = OTHER; note = 2'-O-methylguanosine-3'-phosphate
  modified_base 19: mod_base = OTHER; note = 2'-O-methyladenosine-3'-phosphate
  modified_base 20: mod_base = OTHER; note = 2'-O-methyladenosine-3'-phosphate
  modified_base 21: mod_base = OTHER; note = 2'-O-methyluridine-3'-phosphate ((2S,4R)-1-[29-[[2-(acetylamino)-2-deoxy-beta-D-galactopyra nosyl]oxy]-14,14-bis[[3-[[3-[[5-[[2-(acetylamino)-2-deoxy-b eta-D-galactopyranosyl]oxy]-1-oxopentyl]amino]propyl]amino] -3-oxopropoxy]methyl]-1,12,19,25-tetraoxo-16-oxa-13,20,24-t riazanonacos-1-yl]-4-hydroxy-2-pyrrolidinyl)methyl ester
agtattcattcaaacttgaat

SEQ ID NO: 636 - RNA, 23 nt, synthetic construct
  source 1..23: mol_type = other RNA
  modified_base 1: mod_base = OTHER; note = 2'-O-methyladenosine-3'-phosphorothioate
  modified_base 2: mod_base = OTHER; note = 2'-deoxy-2'-fluorouridine-3'-phosphorothioate
  modified_base 3: mod_base = OTHER; note = 2'-O-methyluridine-3'-phosphate
  modified_base 4: mod_base = OTHER; note = 2'-O-methylcytidine-3'-phosphate
  modified_base 5: mod_base = OTHER; note = 2'-O-methyladenosine-3'-phosphate
  modified_base 6: mod_base = OTHER; note = 2'-deoxy-2'-fluoroadenosine-3'-phosphate
  modified_base 7: mod_base = OTHER; note = 2'-O-methylguanosine-3'-phosphate
  modified_base 8: mod_base = OTHER; note = 2'-deoxy-2'-fluorouridine-3'-phosphate
  modified_base 9: mod_base = OTHER; note = 2'-deoxy-2'-fluorouridine-3'-phosphate
  modified_base 10: mod_base = OTHER; note = 2'-O-methyluridine-3'-phosphate
  modified_base 11: mod_base = OTHER; note = 2'-O-methylguanosine-3'-phosphate
  modified_base 12: mod_base = OTHER; note = 2'-O-methyladenosine-3'-phosphate
  modified_base 13: mod_base = OTHER; note = 2'-O-methyladenosine-3'-phosphate
  modified_base 14: mod_base = OTHER; note = 2'-deoxy-2'-fluorouridine-3'-phosphate
  modified_base 15: mod_base = OTHER; note = 2'-O-methylguanosine-3'-phosphate
  modified_base 16: mod_base = OTHER; note = 2'-deoxy-2'-fluoroadenosine-3'-phosphate
  modified_base 17: mod_base = OTHER; note = 2'-O-methyladenosine-3'-phosphate
  modified_base 18: mod_base = OTHER; note = 2'-O-methyluridine-3'-phosphate
  modified_base 19: mod_base = OTHER; note = 2'-O-methyladenosine-3'-phosphate
  modified_base 20: mod_base = OTHER; note = 2'-O-methylcytidine-3'-phosphate
  modified_base 21: mod_base = OTHER; note = 2'-O-methyluridine-3'-phosphorothioate
  modified_base 22: mod_base = OTHER; note = 2'-O-methyluridine-3'-phosphorothioate
  modified_base 23: mod_base = OTHER; note = 2'-O-methylcytidine
attcaagtttgaatgaatacttc

SEQ ID NO: 637 - RNA, 23 nt, synthetic construct
  source 1..23: mol_type = other RNA
  modified_base 5: mod_base = OTHER; note = 5'-methyluridine-3'-phosphate
  modified_base 7: mod_base = OTHER; note = 5'-methyluridine-3'-phosphate
  modified_base 8: mod_base = OTHER; note = 5'-methyluridine-3'-phosphate
  modified_base 11: mod_base = OTHER; note = 5'-methyluridine-3'-phosphate
  modified_base 12: mod_base = OTHER; note = 5'-methyluridine-3'-phosphate
  modified_base 18: mod_base = OTHER; note = 5'-methyluridine-3'-phosphate
  modified_base 19: mod_base = OTHER; note = 5'-methyluridine-3'-phosphate
  modified_base 23: mod_base = OTHER; note = 5'-methyluridine
gaagtattcattcaaacttgaat

SEQ ID NO: 638 - RNA, 21 nt, synthetic construct
  source 1..21: mol_type = other RNA
  modified_base 1: mod_base = OTHER; note = 2'-O-methyladenosine-3'-phosphorothioate
  modified_base 2: mod_base = OTHER; note = 2'-O-methylguanosine-3'-phosphorothioate
  modified_base 3: mod_base = OTHER; note = 2'-O-methylguanosine-3'-phosphate
  modified_base 4: mod_base = OTHER; note = 2'-O-methyladenosine-3'-phosphate
  modified_base 5: mod_base = OTHER; note = 2'-O-methyladenosine-3'-phosphate
  modified_base 6: mod_base = OTHER; note = 2'-O-methylguanosine-3'-phosphate
  modified_base 7: mod_base = OTHER; note = 2'-deoxy-2'-fluorouridine-3'-phosphate
  modified_base 8: mod_base = OTHER; note = 2'-O-methyladenosine-3'-phosphate
  modified_base 9: mod_base = OTHER; note = 2'-deoxy-2'-fluorouridine-3'-phosphate
  modified_base 10: mod_base = OTHER; note = 2'-deoxy-2'-fluorouridine-3'-phosphate
  modified_base 11: mod_base = OTHER; note = 2'-deoxy-2'-fluorocytidine-3'-phosphate
  modified_base 12: mod_base = OTHER; note = 2'-O-methyladenosine-3'-phosphate
  modified_base 13: mod_base = OTHER; note = 2'-O-methyluridine-3'-phosphate
  modified_base 14: mod_base = OTHER; note = 2'-O-methyluridine-3'-phosphate
  modified_base 15: mod_base = OTHER; note = 2'-O-methylcytidine-3'-phosphate
  modified_base 16: mod_base = OTHER; note = 2'-O-methyladenosine-3'-phosphate
  modified_base 17: mod_base = OTHER; note = 2'-O-methyladenosine-3'-phosphate
  modified_base 18: mod_base = OTHER; note = 2'-O-methyladenosine-3'-phosphate
  modified_base 19: mod_base = OTHER; note = 2'-O-methylcytidine-3'-phosphate
  modified_base 20: mod_base = OTHER; note = 2'-O-methyluridine-3'-phosphate
  modified_base 21: mod_base = OTHER; note = 2'-O-methyluridine-3'-phosphate ((2S,4R)-1-[29-[[2-(acetylamino)-2-deoxy-beta-D-galactopyra nosyl]oxy]-14,14-bis[[3-[[3-[[5-[[2-(acetylamino)-2-deoxy-b eta-D-galactopyranosyl]oxy]-1-oxopentyl]amino]propyl]amino] -3-oxopropoxy]methyl]-1,12,19,25-tetraoxo-16-oxa-13,20,24-t riazanonacos-1-yl]-4-hydroxy-2-pyrrolidinyl)methyl ester
aggaagtattcattcaaactt

SEQ ID NO: 639 - RNA, 23 nt, synthetic construct
  source 1..23: mol_type = other RNA
  modified_base 1: mod_base = OTHER; note = 2'-O-methyladenosine-3'-phosphorothioate
  modified_base 2: mod_base = OTHER; note = 2'-deoxy-2'-fluoroadenosine-3'-phosphorothioate
  modified_base 3: mod_base = OTHER; note = 2'-O-methylguanosine-3'-phosphate
  modified_base 4: mod_base = OTHER; note = 2'-O-methyluridine-3'-phosphate
  modified_base 5: mod_base = OTHER; note = 2'-O-methyluridine-3'-phosphate
  modified_base 6: mod_base = OTHER; note = 2'-deoxy-2'-fluorouridine-3'-phosphate
  modified_base 7: mod_base = OTHER; note = 2'-O-methylguanosine-3'-phosphate
  modified_base 8: mod_base = OTHER; note = 2'-deoxy-2'-fluoroadenosine-3'-phosphate
  modified_base 9: mod_base = OTHER; note = 2'-deoxy-2'-fluoroadenosine-3'-phosphate
  modified_base 10: mod_base = OTHER; note = 2'-O-methyluridine-3'-phosphate
  modified_base 11: mod_base = OTHER; note = 2'-O-methylguanosine-3'-phosphate
  modified_base 12: mod_base = OTHER; note = 2'-O-methyladenosine-3'-phosphate
  modified_base 13: mod_base = OTHER; note = 2'-O-methyladenosine-3'-phosphate
  modified_base 14: mod_base = OTHER; note = 2'-deoxy-2'-fluorouridine-3'-phosphate
  modified_base 15: mod_base = OTHER; note = 2'-O-methyladenosine-3'-phosphate
  modified_base 16: mod_base = OTHER; note = 2'-deoxy-2'-fluorocytidine-3'-phosphate
  modified_base 17: mod_base = OTHER; note = 2'-O-methyluridine-3'-phosphate
  modified_base 18: mod_base = OTHER; note = 2'-O-methyluridine-3'-phosphate
  modified_base 19: mod_base = OTHER; note = 2'-O-methylcytidine-3'-phosphate
  modified_base 20: mod_base = OTHER; note = 2'-O-methylcytidine-3'-phosphate
  modified_base 21: mod_base = OTHER; note = 2'-O-methyluridine-3'-phosphorothioate
  modified_base 22: mod_base = OTHER; note = 2'-O-methyladenosine-3'-phosphorothioate
  modified_base 23: mod_base = OTHER; note = 2'-O-methylguanosine
aagtttgaatgaatacttcctag

SEQ ID NO: 640 - RNA, 23 nt, synthetic construct
  source 1..23: mol_type = other RNA
  modified_base 2: mod_base = OTHER; note = 5'-methyluridine-3'-phosphate
  modified_base 9: mod_base = OTHER; note = 5'-methyluridine-3'-phosphate
  modified_base 11: mod_base = OTHER; note = 5'-methyluridine-3'-phosphate
  modified_base 12: mod_base = OTHER; note = 5'-methyluridine-3'-phosphate
  modified_base 15: mod_base = OTHER; note = 5'-methyluridine-3'-phosphate
  modified_base 16: mod_base = OTHER; note = 5'-methyluridine-3'-phosphate
  modified_base 22: mod_base = OTHER; note = 5'-methyluridine-3'-phosphate
  modified_base 23: mod_base = OTHER; note = 5'-methyluridine
ctaggaagtattcattcaaactt

SEQ ID NO: 641 - RNA, 21 nt, synthetic construct
  source 1..21: mol_type = other RNA
  modified_base 1: mod_base = OTHER; note = 2'-O-methylcytidine-3'-phosphorothioate
  modified_base 2: mod_base = OTHER; note = 2'-O-methyladenosine-3'-phosphorothioate
  modified_base 3: mod_base = OTHER; note = 2'-O-methyluridine-3'-phosphate
  modified_base 4: mod_base = OTHER; note = 2'-O-methylguanosine-3'-phosphate
  modified_base 5: mod_base = OTHER; note = 2'-O-methyluridine-3'-phosphate
  modified_base 6: mod_base = OTHER; note = 2'-deoxy-2'-fluoroguanosine-3'-phosphate
  modified_base 7: mod_base = OTHER; note = 2'-deoxy-2'-fluorocytidine-3'-phosphate
  modified_base 8: mod_base = OTHER; note = 2'-O-methyladenosine-3'-phosphate
  modified_base 9: mod_base = OTHER; note = 2'-deoxy-2'-fluorocytidine-3'-phosphate
  modified_base 10: mod_base = OTHER; note = 2'-O-methyladenosine-3'-phosphate
  modified_base 11: mod_base = OTHER; note = 2'-deoxy-2'-fluorouridine-3'-phosphate
  modified_base 12: mod_base = OTHER; note = 2'-deoxy-2'-fluorouridine-3'-phosphate
  modified_base 13: mod_base = OTHER; note = 2'-O-methylguanosine-3'-phosphate
  modified_base 14: mod_base = OTHER; note = 2'-O-methyladenosine-3'-phosphate
  modified_base 15: mod_base = OTHER; note = 2'-O-methyladenosine-3'-phosphate
  modified_base 16: mod_base = OTHER; note = 2'-O-methyladenosine-3'-phosphate
  modified_base 17: mod_base = OTHER; note = 2'-O-methyladenosine-3'-phosphate
  modified_base 18: mod_base = OTHER; note = 2'-O-methylcytidine-3'-phosphate
  modified_base 19: mod_base = OTHER; note = 2'-deoxy-2'-fluorouridine-3'-phosphate
  modified_base 20: mod_base = OTHER; note = 2'-O-methylguanosine-3'-phosphate
  modified_base 21: mod_base = OTHER; note 2-hydroxymethyl-4-methoxy-tetrahydrofuran-3-phosphate ((2S,4R)-1-[29-[[2-(acetylamino)-2-deoxy-beta-D-galactopyra nosyl]oxy]-14,14-bis[[3-[[3-[[5-[[2-(acetylamino)-2-deoxy-b eta-D-galactopyranosyl]oxy]-1-oxopentyl]amino]propyl]amino] -3-oxopropoxy]methyl]-1,12,19,25-tetraoxo-16-oxa-13,20,24-t riazanonacos-1-yl]-4-hydroxy-2-pyrrolidinyl)methyl ester
catgtgcacattgaaaactgn

SEQ ID NO: 642 - RNA, 23 nt, synthetic construct
  source 1..23: mol_type = other RNA
  modified_base 1: mod_base = OTHER; note = 2'-O-methyladenosine-3'-phosphorothioate
  modified_base 2: mod_base = OTHER; note = 2'-deoxy-2'-fluorocytidine-3'-phosphorothioate
  modified_base 3: mod_base = OTHER; note = 2'-O-methyladenosine-3'-phosphate
  modified_base 4: mod_base = OTHER; note = 2'-O-methylguanosine-3'-phosphate
  modified_base 5: mod_base = OTHER; note = 2'-deoxy-2'-fluorouridine-3'-phosphate
  modified_base 6: mod_base = OTHER; note = 2'-deoxy-2'-fluorouridine-3'-phosphate
  modified_base 7: mod_base = OTHER; note = 2'-O-methyluridine-3'-phosphate
  modified_base 8: mod_base = OTHER; note = 2'-deoxy-2'-fluorouridine-3'-phosphate
  modified_base 9: mod_base = OTHER; note = 2'-O-methylcytidine-3'-phosphate
  modified_base 10: mod_base = OTHER; note = 2'-O-methyladenosine-3'-phosphate
  modified_base 11: mod_base = OTHER; note = 2'-O-methyladenosine-3'-phosphate
  modified_base 12: mod_base = OTHER; note = 2'-deoxy-2'-fluorouridine-3'-phosphate
  modified_base 13: mod_base = OTHER; note = 2'-O-methylguanosine-3'-phosphate
  modified_base 14: mod_base = OTHER; note = 2'-deoxy-2'-fluorouridine-3'-phosphate
  modified_base 15: mod_base = OTHER; note = 2'-O-methylguanosine-3'-phosphate
  modified_base 16: mod_base = OTHER; note = 2'-deoxy-2'-fluorocytidine-3'-phosphate
  modified_base 17: mod_base = OTHER; note = 2'-O-methyladenosine-3'-phosphate
  modified_base 18: mod_base = OTHER; note = 2'-O-methylcytidine-3'-phosphate
  modified_base 19: mod_base = OTHER; note = 2'-O-methyladenosine-3'-phosphate
  modified_base 20: mod_base = OTHER; note = 2'-O-methyluridine-3'-phosphate
  modified_base 21: mod_base = OTHER; note = 2'-O-methylguanosine-3'-phosphorothioate
  modified_base 22: mod_base = OTHER; note = 2'-O-methylcytidine-3'-phosphorothioate
  modified_base 23: mod_base = OTHER; note = 2'-O-methylguanosine
acagttttcaatgtgcacatgcg

SEQ ID NO: 643 - RNA, 23 nt, synthetic construct
  source 1..23: mol_type = other RNA
  modified_base 5: mod_base = OTHER; note = 5'-methyluridine-3'-phosphate
  modified_base 7: mod_base = OTHER; note = 5'-methyluridine-3'-phosphate
  modified_base 13: mod_base = OTHER; note = 5'-methyluridine-3'-phosphate
  modified_base 14: mod_base = OTHER; note = 5'-methyluridine-3'-phosphate
  modified_base 21: mod_base = OTHER; note = 5'-methyluridine-3'-phosphate
  modified_base 23: mod_base = OTHER; note = 5'-methyluridine
cgcatgtgcacattgaaaactgt

SEQ ID NO: 644 - RNA, 21 nt, synthetic construct
  source 1..21: mol_type = other RNA
  modified_base 1: mod_base = OTHER; note = 2'-O-methylcytidine-3'-phosphorothioate
  modified_base 2: mod_base = OTHER; note = 2'-O-methyladenosine-3'-phosphorothioate
  modified_base 3: mod_base = OTHER; note = 2'-O-methyluridine-3'-phosphate
  modified_base 4: mod_base = OTHER; note = 2'-O-methylguanosine-3'-phosphate
  modified_base 5: mod_base = OTHER; note = 2'-O-methyluridine-3'-phosphate
  modified_base 6: mod_base = OTHER; note = 2'-O-methylguanosine-3'-phosphate
  modified_base 7: mod_base = OTHER; note = 2'-O-methylcytidine-3'-phosphate
  modified_base 8: mod_base = OTHER; note = 2'-O-methyladenosine-3'-phosphate
  modified_base 9: mod_base = OTHER; note = 2'-deoxy-2'-fluorocytidine-3'-phosphate
  modified_base 10: mod_base = OTHER; note = 2'-O-methyladenosine-3'-phosphate
  modified_base 11: mod_base = OTHER; note = 2'-deoxy-2'-fluorouridine-3'-phosphate
  modified_base 12: mod_base = OTHER; note = 2'-O-methyluridine-3'-phosphate
  modified_base 13: mod_base = OTHER; note = 2'-O-methylguanosine-3'-phosphate
  modified_base 14: mod_base = OTHER; note = 2'-O-methyladenosine-3'-phosphate
  modified_base 15: mod_base = OTHER; note = 2'-O-methyladenosine-3'-phosphate
  modified_base 16: mod_base = OTHER; note = 2'-O-methyladenosine-3'-phosphate
  modified_base 17: mod_base = OTHER; note = 2'-O-methyladenosine-3'-phosphate
  modified_base 18: mod_base = OTHER; note = 2'-O-methylcytidine-3'-phosphate
  modified_base 19: mod_base = OTHER; note = 2'-O-methyluridine-3'-phosphate
  modified_base 20: mod_base = OTHER; note = 2'-O-methylguanosine-3'-phosphate
  modified_base 21: mod_base = OTHER; note = 2'-O-methyluridine-3'-phosphate ((2S,4R)-1-[29-[[2-(acetylamino)-2-deoxy-beta-D-galactopyra nosyl]oxy]-14,14-bis[[3-[[3-[[5-[[2-(acetylamino)-2-deoxy-b eta-D-galactopyranosyl]oxy]-1-oxopentyl]amino]propyl]amino] -3-oxopropoxy]methyl]-1,12,19,25-tetraoxo-16-oxa-13,20,24-t riazanonacos-1-yl]-4-hydroxy-2-pyrrolidinyl)methyl ester
catgtgcacattgaaaactgt

SEQ ID NO: 645 - RNA, 23 nt, synthetic construct
  source 1..23: mol_type = other RNA
  modified_base 1: mod_base = OTHER; note = 2'-O-methyladenosine-3'-phosphorothioate
  modified_base 2: mod_base = OTHER; note = 2'-deoxy-2'-fluorocytidine-3'-phosphorothioate
  modified_base 3: mod_base = OTHER; note = 2'-O-methyladenosine-3'-phosphate
  modified_base 4: mod_base = OTHER; note = 2'-O-methylguanosine-3'-phosphate
  modified_base 5: mod_base = OTHER; note = 2'-O-methyluridine-3'-phosphate
  modified_base 6: mod_base = OTHER; note = 2'-O-methyluridine-3'-phosphate
  modified_base 7: mod_base = OTHER; note = Thymidine-glycol nucleic acid (GNA), S-Isomer
  modified_base 8: mod_base = OTHER; note = 2'-O-methyluridine-3'-phosphate
  modified_base 9: mod_base = OTHER; note = 2'-O-methylcytidine-3'-phosphate
  modified_base 10: mod_base = OTHER; note = 2'-O-methyladenosine-3'-phosphate
  modified_base 11: mod_base = OTHER; note = 2'-O-methyladenosine-3'-phosphate
  modified_base 12: mod_base = OTHER; note = 2'-deoxy-2'-fluorouridine-3'-phosphate
  modified_base 13: mod_base = OTHER; note = 2'-O-methylguanosine-3'-phosphate
  modified_base 14: mod_base = OTHER; note = 2'-deoxy-2'-fluorouridine-3'-phosphate
  modified_base 15: mod_base = OTHER; note = 2'-O-methylguanosine-3'-phosphate
  modified_base 16: mod_base = OTHER; note = 2'-deoxy-2'-fluorocytidine-3'-phosphate
  modified_base 17: mod_base = OTHER; note = 2'-O-methyladenosine-3'-phosphate
  modified_base 18: mod_base = OTHER; note = 2'-O-methylcytidine-3'-phosphate
  modified_base 19: mod_base = OTHER; note = 2'-O-methyladenosine-3'-phosphate
  modified_base 20: mod_base = OTHER; note = 2'-O-methyluridine-3'-phosphate
  modified_base 21: mod_base = OTHER; note = 2'-O-methylguanosine-3'-phosphorothioate
  modified_base 22: mod_base = OTHER; note = 2'-O-methylcytidine-3'-phosphorothioate
  modified_base 23: mod_base = OTHER; note = 2'-O-methylguanosine
acagttttcaatgtgcacatgcg

SEQ ID NO: 646 - RNA, 23 nt, synthetic construct
  source 1..23: mol_type = other RNA
  modified_base 5: mod_base = OTHER; note = 5'-methyluridine-3'-phosphate
  modified_base 7: mod_base = OTHER; note = 5'-methyluridine-3'-phosphate
  modified_base 13: mod_base = OTHER; note = 5'-methyluridine-3'-phosphate
  modified_base 14: mod_base = OTHER; note = 5'-methyluridine-3'-phosphate
  modified_base 21: mod_base = OTHER; note = 5'-methyluridine-3'-phosphate
  modified_base 23: mod_base = OTHER; note = 5'-methyluridine
cgcatgtgcacattgaaaactgt

SEQ ID NO: 647 - RNA, 21 nt, synthetic construct
  source 1..21: mol_type = other RNA
  modified_base 1: mod_base = OTHER; note = 2'-O-methylguanosine-3'-phosphorothioate
  modified_base 2: mod_base = OTHER; note = 2'-O-methylguanosine-3'-phosphorothioate
  modified_base 3: mod_base = OTHER; note = 2'-O-methylcytidine-3'-phosphate
  modified_base 4: mod_base = OTHER; note = 2'-O-methyluridine-3'-phosphate
  modified_base 5: mod_base = OTHER; note = 2'-O-methyladenosine-3'-phosphate
  modified_base 6: mod_base = OTHER; note = 2'-O-methyladenosine-3'-phosphate
  modified_base 7: mod_base = OTHER; note = 2'-deoxy-2'-fluoroadenosine-3'-phosphate
  modified_base 8: mod_base = OTHER; note = 2'-O-methyluridine-3'-phosphate
  modified_base 9: mod_base = OTHER; note = 2'-deoxy-2'-fluoroadenosine-3'-phosphate
  modified_base 10: mod_base = OTHER; note = 2'-deoxy-2'-fluoroguanosine-3'-phosphate
  modified_base 11: mod_base = OTHER; note = 2'-deoxy-2'-fluorocytidine-3'-phosphate
  modified_base 12: mod_base = OTHER; note = 2'-O-methyluridine-3'-phosphate
  modified_base 13: mod_base = OTHER; note = 2'-O-methyladenosine-3'-phosphate
  modified_base 14: mod_base = OTHER; note = 2'-O-methylguanosine-3'-phosphate
  modified_base 15: mod_base = OTHER; note = 2'-O-methylguanosine-3'-phosphate
  modified_base 16: mod_base = OTHER; note = 2'-O-methyladenosine-3'-phosphate
  modified_base 17: mod_base = OTHER; note = 2'-O-methyladenosine-3'-phosphate
  modified_base 18: mod_base = OTHER; note = 2'-O-methylguanosine-3'-phosphate
  modified_base 19: mod_base = OTHER; note = 2'-O-methyluridine-3'-phosphate
  modified_base 20: mod_base = OTHER; note = 2'-O-methyladenosine-3'-phosphate
  modified_base 21: mod_base = OTHER; note = 2'-O-methyluridine-3'-phosphate ((2S,4R)-1-[29-[[2-(acetylamino)-2-deoxy-beta-D-galactopyra nosyl]oxy]-14,14-bis[[3-[[3-[[5-[[2-(acetylamino)-2-deoxy-b eta-D-galactopyranosyl]oxy]-1-oxopentyl]amino]propyl]amino] -3-oxopropoxy]methyl]-1,12,19,25-tetraoxo-16-oxa-13,20,24-t riazanonacos-1-yl]-4-hydroxy-2-pyrrolidinyl)methyl ester
ggctaaatagctaggaagtat

SEQ ID NO: 648 - RNA, 23 nt, synthetic construct
  source 1..23: mol_type = other RNA
  modified_base 1: mod_base = OTHER; note = 2'-O-methyladenosine-3'-phosphorothioate
  modified_base 2: mod_base = OTHER; note = 2'-deoxy-2'-fluorouridine-3'-phosphorothioate
  modified_base 3: mod_base = OTHER; note = 2'-O-methyladenosine-3'-phosphate
  modified_base 4: mod_base = OTHER; note = 2'-O-methylcytidine-3'-phosphate
  modified_base 5: mod_base = OTHER; note = 2'-O-methyluridine-3'-phosphate
  modified_base 6: mod_base = OTHER; note = 2'-deoxy-2'-fluorouridine-3'-phosphate
  modified_base 7: mod_base = OTHER; note = 2'-O-methylcytidine-3'-phosphate
  modified_base 8: mod_base = OTHER; note = 2'-deoxy-2'-fluorocytidine-3'-phosphate
  modified_base 9: mod_base = OTHER; note = 2'-deoxy-2'-fluorouridine-3'-phosphate
  modified_base 10: mod_base = OTHER; note = 2'-O-methyladenosine-3'-phosphate
  modified_base 11: mod_base = OTHER; note = 2'-O-methylguanosine-3'-phosphate
  modified_base 12: mod_base = OTHER; note = 2'-O-methylcytidine-3'-phosphate
  modified_base 13: mod_base = OTHER; note = 2'-O-methyluridine-3'-phosphate
  modified_base 14: mod_base = OTHER; note = 2'-deoxy-2'-fluoroadenosine-3'-phosphate
  modified_base 15: mod_base = OTHER; note = 2'-O-methyluridine-3'-phosphate
  modified_base 16: mod_base = OTHER; note = 2'-deoxy-2'-fluorouridine-3'-phosphate
  modified_base 17: mod_base = OTHER; note = 2'-O-methyluridine-3'-phosphate
  modified_base 18: mod_base = OTHER; note = 2'-O-methyladenosine-3'-phosphate
  modified_base 19: mod_base = OTHER; note = 2'-O-methylguanosine-3'-phosphate
  modified_base 20: mod_base = OTHER; note = 2'-O-methylcytidine-3'-phosphate
  modified_base 21: mod_base = OTHER; note = 2'-O-methylcytidine-3'-phosphorothioate
  modified_base 22: mod_base = OTHER; note = 2'-O-methyluridine-3'-phosphorothioate
  modified_base 23: mod_base = OTHER; note = 2'-O-methyluridine
atacttcctagctatttagcctt

SEQ ID NO: 649 - RNA, 23 nt, synthetic construct
  source 1..23: mol_type = other RNA
  modified_base 6: mod_base = OTHER; note = 5'-methyluridine-3'-phosphate
  modified_base 10: mod_base = OTHER; note = 5'-methyluridine-3'-phosphate
  modified_base 14: mod_base = OTHER; note = 5'-methyluridine-3'-phosphate
  modified_base 21: mod_base = OTHER; note = 5'-methyluridine-3'-phosphate
  modified_base 23: mod_base = OTHER; note = 5'-methyluridine
aaggctaaatagctaggaagtat

SEQ ID NO: 650 - RNA, 21 nt, synthetic construct
  source 1..21: mol_type = other RNA
  modified_base 1: mod_base = OTHER; note = 2'-O-methyladenosine-3'-phosphorothioate
  modified_base 2: mod_base = OTHER; note = 2'-O-methyladenosine-3'-phosphorothioate
  modified_base 3: mod_base = OTHER; note = 2'-O-methylguanosine-3'-phosphate
  modified_base 4: mod_base = OTHER; note = 2'-O-methyluridine-3'-phosphate
  modified_base 5: mod_base = OTHER; note = 2'-O-methyladenosine-3'-phosphate
  modified_base 6: mod_base = OTHER; note = 2'-O-methyluridine-3'-phosphate
  modified_base 7: mod_base = OTHER; note = 2'-deoxy-2'-fluorouridine-3'-phosphate
  modified_base 8: mod_base = OTHER; note = 2'-O-methylcytidine-3'-phosphate
  modified_base 9: mod_base = OTHER; note = 2'-deoxy-2'-fluoroadenosine-3'-phosphate
  modified_base 10: mod_base = OTHER; note = 2'-deoxy-2'-fluorouridine-3'-phosphate
  modified_base 11: mod_base = OTHER; note = 2'-deoxy-2'-fluorouridine-3'-phosphate
  modified_base 12: mod_base = OTHER; note = 2'-O-methylcytidine-3'-phosphate
  modified_base 13: mod_base = OTHER; note = 2'-O-methyladenosine-3'-phosphate
  modified_base 14: mod_base = OTHER; note = 2'-O-methyladenosine-3'-phosphate
  modified_base 15: mod_base = OTHER; note = 2'-O-methyladenosine-3'-phosphate
  modified_base 16: mod_base = OTHER; note = 2'-O-methylcytidine-3'-phosphate
  modified_base 17: mod_base = OTHER; note = 2'-O-methyluridine-3'-phosphate
  modified_base 18: mod_base = OTHER; note = 2'-O-methyluridine-3'-phosphate
  modified_base 19: mod_base = OTHER; note = 2'-O-methylguanosine-3'-phosphate
  modified_base 20: mod_base = OTHER; note = 2'-O-methyladenosine-3'-phosphate
  modified_base 21: mod_base = OTHER; note = 2'-O-methyladenosine-3'-phosphate ((2S,4R)-1-[29-[[2-(acetylamino)-2-deoxy-beta-D-galactopyra nosyl]oxy]-14,14-bis[[3-[[3-[[5-[[2-(acetylamino)-2-deoxy-b eta-D-galactopyranosyl]oxy]-1-oxopentyl]amino]propyl]amino] -3-oxopropoxy]methyl]-1,12,19,25-tetraoxo-16-oxa-13,20,24-t riazanonacos-1-yl]-4-hydroxy-2-pyrrolidinyl)methyl ester
aagtattcattcaaacttgaa

SEQ ID NO: 651 - RNA, 23 nt, synthetic construct
  source 1..23: mol_type = other RNA
  modified_base 1: mod_base = OTHER; note = 2'-O-methyluridine-3'-phosphorothioate
  modified_base 2: mod_base = OTHER; note = 2'-deoxy-2'-fluorouridine-3'-phosphorothioate
  modified_base 3: mod_base = OTHER; note = 2'-O-methylcytidine-3'-phosphate
  modified_base 4: mod_base = OTHER; note = 2'-O-methyladenosine-3'-phosphate
  modified_base 5: mod_base = OTHER; note = 2'-O-methyladenosine-3'-phosphate
  modified_base 6: mod_base = OTHER; note = 2'-deoxy-2'-fluoroguanosine-3'-phosphate
  modified_base 7: mod_base = OTHER; note = 2'-O-methyluridine-3'-phosphate
  modified_base 8: mod_base = OTHER; note = 2'-deoxy-2'-fluorouridine-3'-phosphate
  modified_base 9: mod_base = OTHER; note = 2'-deoxy-2'-fluorouridine-3'-phosphate
  modified_base 10: mod_base = OTHER; note = 2'-O-methylguanosine-3'-phosphate
  modified_base 11: mod_base = OTHER; note = 2'-O-methyladenosine-3'-phosphate
  modified_base 12: mod_base = OTHER; note = 2'-O-methyladenosine-3'-phosphate
  modified_base 13: mod_base = OTHER; note = 2'-O-methyluridine-3'-phosphate
  modified_base 14: mod_base = OTHER; note = 2'-deoxy-2'-fluoroguanosine-3'-phosphate
  modified_base 15: mod_base = OTHER; note = 2'-O-methyladenosine-3'-phosphate
  modified_base 16: mod_base = OTHER; note = 2'-deoxy-2'-fluoroadenosine-3'-phosphate
  modified_base 17: mod_base = OTHER; note = 2'-O-methyluridine-3'-phosphate
  modified_base 18: mod_base = OTHER; note = 2'-O-methyladenosine-3'-phosphate
  modified_base 19: mod_base = OTHER; note = 2'-O-methylcytidine-3'-phosphate
  modified_base 20: mod_base = OTHER; note = 2'-O-methyluridine-3'-phosphate
  modified_base 21: mod_base = OTHER; note = 2'-O-methyluridine-3'-phosphorothioate
  modified_base 22: mod_base = OTHER; note = 2'-O-methylcytidine-3'-phosphorothioate
  modified_base 23: mod_base = OTHER; note = 2'-O-methylcytidine
ttcaagtttgaatgaatacttcc

SEQ ID NO: 652 - RNA, 23 nt, synthetic construct
  source 1..23: mol_type = other RNA
  modified_base 6: mod_base = OTHER; note = 5'-methyluridine-3'-phosphate
  modified_base 8: mod_base = OTHER; note = 5'-methyluridine-3'-phosphate
  modified_base 9: mod_base = OTHER; note = 5'-methyluridine-3'-phosphate
  modified_base 12: mod_base = OTHER; note = 5'-methyluridine-3'-phosphate
  modified_base 13: mod_base = OTHER; note = 5'-methyluridine-3'-phosphate
  modified_base 19: mod_base = OTHER; note = 5'-methyluridine-3'-phosphate
  modified_base 20: mod_base = OTHER; note = 5'-methyluridine-3'-phosphate
ggaagtattcattcaaacttgaa

SEQ ID NO: 653 - RNA, 21 nt, synthetic construct
  source 1..21: mol_type = other RNA
  modified_base 1: mod_base = OTHER; note = 2'-O-methyladenosine-3'-phosphorothioate
  modified_base 2: mod_base = OTHER; note = 2'-O-methyladenosine-3'-phosphorothioate
  modified_base 3: mod_base = OTHER; note = 2'-O-methyluridine-3'-phosphate
  modified_base 4: mod_base = OTHER; note = 2'-O-methyluridine-3'-phosphate
  modified_base 5: mod_base = OTHER; note = 2'-O-methylcytidine-3'-phosphate
  modified_base 6: mod_base = OTHER; note = 2'-O-methyluridine-3'-phosphate
  modified_base 7: mod_base = OTHER; note = 2'-deoxy-2'-fluoroadenosine-3'-phosphate
  modified_base 8: mod_base = OTHER; note = 2'-O-methyladenosine-3'-phosphate
  modified_base 9: mod_base = OTHER; note = 2'-deoxy-2'-fluoroguanosine-3'-phosphate
  modified_base 10: mod_base = OTHER; note = 2'-deoxy-2'-fluoroguanosine-3'-phosphate
  modified_base 11: mod_base = OTHER; note = 2'-deoxy-2'-fluorocytidine-3'-phosphate
  modified_base 12: mod_base = OTHER; note = 2'-O-methyluridine-3'-phosphate
  modified_base 13: mod_base = OTHER; note = 2'-O-methyladenosine-3'-phosphate
  modified_base 14: mod_base = OTHER; note = 2'-O-methyladenosine-3'-phosphate
  modified_base 15: mod_base = OTHER; note = 2'-O-methyladenosine-3'-phosphate
  modified_base 16: mod_base = OTHER; note = 2'-O-methyluridine-3'-phosphate
  modified_base 17: mod_base = OTHER; note = 2'-O-methyladenosine-3'-phosphate
  modified_base 18: mod_base = OTHER; note = 2'-O-methylguanosine-3'-phosphate
  modified_base 19: mod_base = OTHER; note = 2'-O-methylcytidine-3'-phosphate
  modified_base 20: mod_base = OTHER; note = 2'-O-methyluridine-3'-phosphate
  modified_base 21: mod_base = OTHER; note = 2'-O-methyladenosine-3'-phosphate ((2S,4R)-1-[29-[[2-(acetylamino)-2-deoxy-beta-D-galactopyra nosyl]oxy]-14,14-bis[[3-[[3-[[5-[[2-(acetylamino)-2-deoxy-b eta-D-galactopyranosyl]oxy]-1-oxopentyl]amino]propyl]amino] -3-oxopropoxy]methyl]-1,12,19,25-tetraoxo-16-oxa-13,20,24-t riazanonacos-1-yl]-4-hydroxy-2-pyrrolidinyl)methyl ester
aattctaaggctaaatagcta

SEQ ID NO: 654 - RNA, 23 nt, synthetic construct
  source 1..23: mol_type = other RNA
  modified_base 1: mod_base = OTHER; note = 2'-O-methyluridine-3'-phosphorothioate
  modified_base 2: mod_base = OTHER; note = 2'-deoxy-2'-fluoroadenosine-3'-phosphorothioate
  modified_base 3: mod_base = OTHER; note = 2'-O-methylguanosine-3'-phosphate
  modified_base 4: mod_base = OTHER; note = 2'-O-methylcytidine-3'-phosphate
  modified_base 5: mod_base = OTHER; note = 2'-O-methyluridine-3'-phosphate
  modified_base 6: mod_base = OTHER; note = 2'-deoxy-2'-fluoroadenosine-3'-phosphate
  modified_base 7: mod_base = OTHER; note = 2'-O-methyluridine-3'-phosphate
  modified_base 8: mod_base = OTHER; note = 2'-deoxy-2'-fluorouridine-3'-phosphate
  modified_base 9: mod_base = OTHER; note = 2'-deoxy-2'-fluorouridine-3'-phosphate
  modified_base 10: mod_base = OTHER; note = 2'-O-methyladenosine-3'-phosphate
  modified_base 11: mod_base = OTHER; note = 2'-O-methylguanosine-3'-phosphate
  modified_base 12: mod_base = OTHER; note = 2'-O-methylcytidine-3'-phosphate
  modified_base 13: mod_base = OTHER; note = 2'-O-methylcytidine-3'-phosphate
  modified_base 14: mod_base = OTHER; note = 2'-deoxy-2'-fluorouridine-3'-phosphate
  modified_base 15: mod_base = OTHER; note = 2'-O-methyluridine-3'-phosphate
  modified_base 16: mod_base = OTHER; note = 2'-deoxy-2'-fluoroadenosine-3'-phosphate
  modified_base 17: mod_base = OTHER; note = 2'-O-methylguanosine-3'-phosphate
  modified_base 18: mod_base = OTHER; note = 2'-O-methyladenosine-3'-phosphate
  modified_base 19: mod_base = OTHER; note = 2'-O-methyladenosine-3'-phosphate
  modified_base 20: mod_base = OTHER; note = 2'-O-methyluridine-3'-phosphate
  modified_base 21: mod_base = OTHER; note = 2'-O-methyluridine-3'-phosphorothioate
  modified_base 22: mod_base = OTHER; note = 2'-O-methylcytidine-3'-phosphorothioate
  modified_base 23: mod_base = OTHER; note = 2'-O-methyluridine
tagctatttagccttagaattct

SEQ ID NO: 655 - RNA, 23 nt, synthetic construct
  source 1..23: mol_type = other RNA
  modified_base 5: mod_base = OTHER; note = 5'-methyluridine-3'-phosphate
  modified_base 6: mod_base = OTHER; note = 5'-methyluridine-3'-phosphate
  modified_base 8: mod_base = OTHER; note = 5'-methyluridine-3'-phosphate
  modified_base 14: mod_base = OTHER; note = 5'-methyluridine-3'-phosphate
  modified_base 18: mod_base = OTHER; note = 5'-methyluridine-3'-phosphate
  modified_base 22: mod_base = OTHER; note = 5'-methyluridine-3'-phosphate
agaattctaaggctaaatagcta

SEQ ID NO: 656 - RNA, 21 nt, synthetic construct
  source 1..21: mol_type = other RNA
  modified_base 1: mod_base = OTHER; note = 2'-O-methyluridine-3'-phosphorothioate
  modified_base 2: mod_base = OTHER; note = 2'-O-methyluridine-3'-phosphorothioate
  modified_base 3: mod_base = OTHER; note = 2'-O-methylguanosine-3'-phosphate
  modified_base 4: mod_base = OTHER; note = 2'-O-methyladenosine-3'-phosphate
  modified_base 5: mod_base = OTHER; note = 2'-O-methyladenosine-3'-phosphate
  modified_base 6: mod_base = OTHER; note = 2'-O-methyluridine-3'-phosphate
  modified_base 7: mod_base = OTHER; note = 2'-deoxy-2'-fluoroadenosine-3'-phosphate
  modified_base 8: mod_base = OTHER; note = 2'-O-methyluridine-3'-phosphate
  modified_base 9: mod_base = OTHER; note = 2'-deoxy-2'-fluorouridine-3'-phosphate
  modified_base 10: mod_base = OTHER; note = 2'-deoxy-2'-fluorocytidine-3'-phosphate
  modified_base 11: mod_base = OTHER; note = 2'-deoxy-2'-fluorouridine-3'-phosphate
  modified_base 12: mod_base = OTHER; note = 2'-O-methyluridine-3'-phosphate
  modified_base 13: mod_base = OTHER; note = 2'-O-methylcytidine-3'-phosphate
  modified_base 14: mod_base = OTHER; note = 2'-O-methyladenosine-3'-phosphate
  modified_base 15: mod_base = OTHER; note = 2'-O-methyladenosine-3'-phosphate
  modified_base 16: mod_base = OTHER; note = 2'-O-methyladenosine-3'-phosphate
  modified_base 17: mod_base = OTHER; note = 2'-O-methylguanosine-3'-phosphate
  modified_base 18: mod_base = OTHER; note = 2'-O-methyladenosine-3'-phosphate
  modified_base 19: mod_base = OTHER; note = 2'-O-methylguanosine-3'-phosphate
  modified_base 20: mod_base = OTHER; note = 2'-O-methyladenosine-3'-phosphate
  modified_base 21: mod_base = OTHER; note = 2'-O-methyladenosine-3'-phosphate ((2S,4R)-1-[29-[[2-(acetylamino)-2-deoxy-beta-D-galactopyra nosyl]oxy]-14,14-bis[[3-[[3-[[5-[[2-(acetylamino)-2-deoxy-b eta-D-galactopyranosyl]oxy]-1-oxopentyl]amino]propyl]amino] -3-oxopropoxy]methyl]-1,12,19,25-tetraoxo-16-oxa-13,20,24-t riazanonacos-1-yl]-4-hydroxy-2-pyrrolidinyl)methyl ester
ttgaatattcttcaaagagaa

SEQ ID NO: 657 - RNA, 23 nt, synthetic construct
  source 1..23: mol_type = other RNA
  modified_base 1: mod_base = OTHER; note = 2'-O-methyluridine-3'-phosphorothioate
  modified_base 2: mod_base = OTHER; note = 2'-deoxy-2'-fluorouridine-3'-phosphorothioate
  modified_base 3: mod_base = OTHER; note = 2'-O-methylcytidine-3'-phosphate
  modified_base 4: mod_base = OTHER; note = 2'-O-methyluridine-3'-phosphate
  modified_base 5: mod_base = OTHER; note = 2'-O-methylcytidine-3'-phosphate
  modified_base 6: mod_base = OTHER; note = 2'-deoxy-2'-fluorouridine-3'-phosphate
  modified_base 7: mod_base = OTHER; note = 2'-O-methyluridine-3'-phosphate
  modified_base 8: mod_base = OTHER; note = 2'-deoxy-2'-fluorouridine-3'-phosphate
  modified_base 9: mod_base = OTHER; note = 2'-deoxy-2'-fluoroguanosine-3'-phosphate
  modified_base 10: mod_base = OTHER; note = 2'-O-methyladenosine-3'-phosphate
  modified_base 11: mod_base = OTHER; note = 2'-O-methyladenosine-3'-phosphate
  modified_base 12: mod_base = OTHER; note = 2'-O-methylguanosine-3'-phosphate
  modified_base 13: mod_base = OTHER; note = 2'-O-methyladenosine-3'-phosphate
  modified_base 14: mod_base = OTHER; note = 2'-deoxy-2'-fluoroadenosine-3'-phosphate
  modified_base 15: mod_base = OTHER; note = 2'-O-methyluridine-3'-phosphate
  modified_base 16: mod_base = OTHER; note = 2'-deoxy-2'-fluoroadenosine-3'-phosphate
  modified_base 17: mod_base = OTHER; note = 2'-O-methyluridine-3'-phosphate
  modified_base 18: mod_base = OTHER; note = 2'-O-methyluridine-3'-phosphate
  modified_base 19: mod_base = OTHER; note = 2'-O-methylcytidine-3'-phosphate
  modified_base 20: mod_base = OTHER; note = 2'-O-methyladenosine-3'-phosphate
  modified_base 21: mod_base = OTHER; note = 2'-O-methyladenosine-3'-phosphorothioate
  modified_base 22: mod_base = OTHER; note = 2'-O-methylguanosine-3'-phosphorothioate
  modified_base 23: mod_base = OTHER; note = 2'-O-methyluridine
ttctctttgaagaatattcaagt

SEQ ID NO: 658 - RNA, 23 nt, synthetic construct
  source 1..23: mol_type = other RNA
  modified_base 3: mod_base = OTHER; note = 5'-methyluridine-3'-phosphate
  modified_base 4: mod_base = OTHER; note = 5'-methyluridine-3'-phosphate
  modified_base 8: mod_base = OTHER; note = 5'-methyluridine-3'-phosphate
  modified_base 10: mod_base = OTHER; note = 5'-methyluridine-3'-phosphate
  modified_base 11: mod_base = OTHER; note = 5'-methyluridine-3'-phosphate
  modified_base 13: mod_base = OTHER; note = 5'-methyluridine-3'-phosphate
  modified_base 14: mod_base = OTHER; note = 5'-methyluridine-3'-phosphate
acttgaatattcttcaaagagaa

SEQ ID NO: 659 - RNA, 21 nt, synthetic construct
  source 1..21: mol_type = other RNA
  modified_base 1: mod_base = OTHER; note = 2'-O-methyluridine-3'-phosphorothioate
  modified_base 2: mod_base = OTHER; note = 2'-O-methyladenosine-3'-phosphorothioate
  modified_base 3: mod_base = OTHER; note = 2'-O-methylguanosine-3'-phosphate
  modified_base 4: mod_base = OTHER; note = 2'-O-methylcytidine-3'-phosphate
  modified_base 5: mod_base = OTHER; note = 2'-O-methyluridine-3'-phosphate
  modified_base 6: mod_base = OTHER; note = 2'-O-methyladenosine-3'-phosphate
  modified_base 7: mod_base = OTHER; note = 2'-deoxy-2'-fluoroguanosine-3'-phosphate
  modified_base 8: mod_base = OTHER; note = 2'-O-methylguanosine-3'-phosphate
  modified_base 9: mod_base = OTHER; note = 2'-deoxy-2'-fluoroadenosine-3'-phosphate
  modified_base 10: mod_base = OTHER; note = 2'-deoxy-2'-fluoroadenosine-3'-phosphate
  modified_base 11: mod_base = OTHER; note = 2'-deoxy-2'-fluoroguanosine-3'-phosphate
  modified_base 12: mod_base = OTHER; note = 2'-O-methyluridine-3'-phosphate
  modified_base 13: mod_base = OTHER; note = 2'-O-methyladenosine-3'-phosphate
  modified_base 14: mod_base = OTHER; note = 2'-O-methyluridine-3'-phosphate
  modified_base 15: mod_base = OTHER; note = 2'-O-methyluridine-3'-phosphate
  modified_base 16: mod_base = OTHER; note = 2'-O-methylcytidine-3'-phosphate
  modified_base 17: mod_base = OTHER; note = 2'-O-methyladenosine-3'-phosphate
  modified_base 18: mod_base = OTHER; note = 2'-O-methyluridine-3'-phosphate
  modified_base 19: mod_base = OTHER; note = 2'-O-methyluridine-3'-phosphate
  modified_base 20: mod_base = OTHER; note = 2'-O-methylcytidine-3'-phosphate
  modified_base 21: mod_base = OTHER; note = 2'-O-methyladenosine-3'-phosphate ((2S,4R)-1-[29-[[2-(acetylamino)-2-deoxy-beta-D-galactopyra nosyl]oxy]-14,14-bis[[3-[[3-[[5-[[2-(acetylamino)-2-deoxy-b eta-D-galactopyranosyl]oxy]-1-oxopentyl]amino]propyl]amino] -3-oxopropoxy]methyl]-1,12,19,25-tetraoxo-16-oxa-13,20,24-t riazanonacos-1-yl]-4-hydroxy-2-pyrrolidinyl)methyl ester
tagctaggaagtattcattca

SEQ ID NO: 660 - RNA, 23 nt, synthetic construct
  source 1..23: mol_type = other RNA
  modified_base 1: mod_base = OTHER; note = 2'-O-methyluridine-3'-phosphorothioate
  modified_base 2: mod_base = OTHER; note = 2'-deoxy-2'-fluoroguanosine-3'-phosphorothioate
  modified_base 3: mod_base = OTHER; note = 2'-O-methyladenosine-3'-phosphate
  modified_base 4: mod_base = OTHER; note = 2'-O-methyladenosine-3'-phosphate
  modified_base 5: mod_base = OTHER; note = 2'-O-methyluridine-3'-phosphate
  modified_base 6: mod_base = OTHER; note = 2'-deoxy-2'-fluoroguanosine-3'-phosphate
  modified_base 7: mod_base = OTHER; note = 2'-O-methyladenosine-3'-phosphate
  modified_base 8: mod_base = OTHER; note = 2'-deoxy-2'-fluoroadenosine-3'-phosphate
  modified_base 9: mod_base = OTHER; note = 2'-deoxy-2'-fluorouridine-3'-phosphate
  modified_base 10: mod_base = OTHER; note = 2'-O-methyladenosine-3'-phosphate
  modified_base 11: mod_base = OTHER; note = 2'-O-methylcytidine-3'-phosphate
  modified_base 12: mod_base = OTHER; note = 2'-O-methyluridine-3'-phosphate
  modified_base 13: mod_base = OTHER; note = 2'-O-methyluridine-3'-phosphate
  modified_base 14: mod_base = OTHER; note = 2'-deoxy-2'-fluorocytidine-3'-phosphate
  modified_base 15: mod_base = OTHER; note = 2'-O-methylcytidine-3'-phosphate
  modified_base 16: mod_base = OTHER; note = 2'-deoxy-2'-fluorouridine-3'-phosphate
  modified_base 17: mod_base = OTHER; note = 2'-O-methyladenosine-3'-phosphate
  modified_base 18: mod_base = OTHER; note = 2'-O-methylguanosine-3'-phosphate
  modified_base 19: mod_base = OTHER; note = 2'-O-methylcytidine-3'-phosphate
  modified_base 20: mod_base = OTHER; note = 2'-O-methyluridine-3'-phosphate
  modified_base 21: mod_base = OTHER; note = 2'-O-methyladenosine-3'-phosphorothioate
  modified_base 22: mod_base = OTHER; note = 2'-O-methyluridine-3'-phosphorothioate
  modified_base 23: mod_base = OTHER; note = 2'-O-methyluridine
tgaatgaatacttcctagctatt

SEQ ID NO: 661 - RNA, 23 nt, synthetic construct
  source 1..23: mol_type = other RNA
  modified_base 3: mod_base = OTHER; note = 5'-methyluridine-3'-phosphate
  modified_base 7: mod_base = OTHER; note = 5'-methyluridine-3'-phosphate
  modified_base 14: mod_base = OTHER; note = 5'-methyluridine-3'-phosphate
  modified_base 16: mod_base = OTHER; note = 5'-methyluridine-3'-phosphate
  modified_base 17: mod_base = OTHER; note = 5'-methyluridine-3'-phosphate
  modified_base 20: mod_base = OTHER; note = 5'-methyluridine-3'-phosphate
  modified_base 21: mod_base = OTHER; note = 5'-methyluridine-3'-phosphate
aatagctaggaagtattcattca

SEQ ID NO: 662 - RNA, 21 nt, synthetic construct
  source 1..21: mol_type = other RNA
  modified_base 1: mod_base = OTHER; note = 2'-O-methyladenosine-3'-phosphorothioate
  modified_base 2: mod_base = OTHER; note = 2'-O-methyladenosine-3'-phosphorothioate
  modified_base 3: mod_base = OTHER; note = 2'-O-methylcytidine-3'-phosphate
  modified_base 4: mod_base = OTHER; note = 2'-O-methyluridine-3'-phosphate
  modified_base 5: mod_base = OTHER; note = 2'-O-methyluridine-3'-phosphate
  modified_base 6: mod_base = OTHER; note = 2'-O-methylguanosine-3'-phosphate
  modified_base 7: mod_base = OTHER; note = 2'-deoxy-2'-fluoroadenosine-3'-phosphate
  modified_base 8: mod_base = OTHER; note = 2'-O-methyladenosine-3'-phosphate
  modified_base 9: mod_base = OTHER; note = 2'-deoxy-2'-fluorouridine-3'-phosphate
  modified_base 10: mod_base = OTHER; note = 2'-deoxy-2'-fluoroadenosine-3'-phosphate
  modified_base 11: mod_base = OTHER; note = 2'-deoxy-2'-fluorouridine-3'-phosphate
  modified_base 12: mod_base = OTHER; note = 2'-O-methyluridine-3'-phosphate
  modified_base 13: mod_base = OTHER; note = 2'-O-methylcytidine-3'-phosphate
  modified_base 14: mod_base = OTHER; note = 2'-O-methyluridine-3'-phosphate
  modified_base 15: mod_base = OTHER; note = 2'-O-methyluridine-3'-phosphate
  modified_base 16: mod_base = OTHER; note = 2'-O-methylcytidine-3'-phosphate
  modified_base 17: mod_base = OTHER; note = 2'-O-methyladenosine-3'-phosphate
  modified_base 18: mod_base = OTHER; note = 2'-O-methyladenosine-3'-phosphate
  modified_base 19: mod_base = OTHER; note = 2'-O-methyladenosine-3'-phosphate
  modified_base 20: mod_base = OTHER; note = 2'-O-methylguanosine-3'-phosphate
  modified_base 21: mod_base = OTHER; note = 2'-O-methyladenosine-3'-phosphate ((2S,4R)-1-[29-[[2-(acetylamino)-2-deoxy-beta-D-galactopyra nosyl]oxy]-14,14-bis[[3-[[3-[[5-[[2-(acetylamino)-2-deoxy-b eta-D-galactopyranosyl]oxy]-1-oxopentyl]amino]propyl]amino] -3-oxopropoxy]methyl]-1,12,19,25-tetraoxo-16-oxa-13,20,24-t riazanonacos-1-yl]-4-hydroxy-2-pyrrolidinyl)methyl ester
aacttgaatattcttcaaaga

SEQ ID NO: 663 - RNA, 23 nt, synthetic construct
  source 1..23: mol_type = other RNA
  modified_base 1: mod_base = OTHER; note = 2'-O-methyluridine-3'-phosphorothioate
  modified_base 2: mod_base = OTHER; note = 2'-deoxy-2'-fluorocytidine-3'-phosphorothioate
  modified_base 3: mod_base = OTHER; note = 2'-O-methyluridine-3'-phosphate
  modified_base 4: mod_base = OTHER; note = 2'-O-methyluridine-3'-phosphate
  modified_base 5: mod_base = OTHER; note = 2'-O-methyluridine-3'-phosphate
  modified_base 6: mod_base = OTHER; note = 2'-deoxy-2'-fluoroguanosine-3'-phosphate
  modified_base 7: mod_base = OTHER; note = 2'-O-methyladenosine-3'-phosphate
  modified_base 8: mod_base = OTHER; note = 2'-deoxy-2'-fluoroadenosine-3'-phosphate
  modified_base 9: mod_base = OTHER; note = 2'-deoxy-2'-fluoroguanosine-3'-phosphate
  modified_base 10: mod_base = OTHER; note = 2'-O-methyladenosine-3'-phosphate
  modified_base 11: mod_base = OTHER; note = 2'-O-methyladenosine-3'-phosphate
  modified_base 12: mod_base = OTHER; note = 2'-O-methyluridine-3'-phosphate
  modified_base 13: mod_base = OTHER; note = 2'-O-methyladenosine-3'-phosphate
  modified_base 14: mod_base = OTHER; note = 2'-deoxy-2'-fluorouridine-3'-phosphate
  modified_base 15: mod_base = OTHER; note = 2'-O-methyluridine-3'-phosphate
  modified_base 16: mod_base = OTHER; note = 2'-deoxy-2'-fluorocytidine-3'-phosphate
  modified_base 17: mod_base = OTHER; note = 2'-O-methyladenosine-3'-phosphate
  modified_base 18: mod_base = OTHER; note = 2'-O-methyladenosine-3'-phosphate
  modified_base 19: mod_base = OTHER; note = 2'-O-methylguanosine-3'-phosphate
  modified_base 20: mod_base = OTHER; note = 2'-O-methyluridine-3'-phosphate
  modified_base 21: mod_base = OTHER; note = 2'-O-methyluridine-3'-phosphorothioate
  modified_base 22: mod_base = OTHER; note = 2'-O-methyluridine-3'-phosphorothioate
  modified_base 23: mod_base = OTHER; note = 2'-O-methylguanosine
tctttgaagaatattcaagtttg

SEQ ID NO: 664 - RNA, 23 nt, synthetic construct
  source 1..23: mol_type = other RNA
  modified_base 6: mod_base = OTHER; note = 5'-methyluridine-3'-phosphate
  modified_base 7: mod_base = OTHER; note = 5'-methyluridine-3'-phosphate
  modified_base 11: mod_base = OTHER; note = 5'-methyluridine-3'-phosphate
  modified_base 13: mod_base = OTHER; note = 5'-methyluridine-3'-phosphate
  modified_base 14: mod_base = OTHER; note = 5'-methyluridine-3'-phosphate
  modified_base 16: mod_base = OTHER; note = 5'-methyluridine-3'-phosphate
  modified_base 17: mod_base = OTHER; note = 5'-methyluridine-3'-phosphate
caaacttgaatattcttcaaaga

SEQ ID NO: 665 - RNA, 21 nt, synthetic construct
  source 1..21: mol_type = other RNA
  modified_base 1: mod_base = OTHER; note = 2'-O-methylguanosine-3'-phosphorothioate
  modified_base 2: mod_base = OTHER; note = 2'-O-methyladenosine-3'-phosphorothioate
  modified_base 3: mod_base = OTHER; note = 2'-O-methyladenosine-3'-phosphate
  modified_base 4: mod_base = OTHER; note = 2'-O-methyluridine-3'-phosphate
  modified_base 5: mod_base = OTHER; note = 2'-O-methyluridine-3'-phosphate
  modified_base 6: mod_base = OTHER; note = 2'-O-methylcytidine-3'-phosphate
  modified_base 7: mod_base = OTHER; note = 2'-deoxy-2'-fluorouridine-3'-phosphate
  modified_base 8: mod_base = OTHER; note = 2'-O-methyladenosine-3'-phosphate
  modified_base 9: mod_base = OTHER; note = 2'-deoxy-2'-fluoroadenosine-3'-phosphate
  modified_base 10: mod_base = OTHER; note = 2'-deoxy-2'-fluoroguanosine-3'-phosphate
  modified_base 11: mod_base = OTHER; note = 2'-deoxy-2'-fluoroguanosine-3'-phosphate
  modified_base 12: mod_base = OTHER; note = 2'-O-methylcytidine-3'-phosphate
  modified_base 13: mod_base = OTHER; note = 2'-O-methyluridine-3'-phosphate
  modified_base 14: mod_base = OTHER; note = 2'-O-methyladenosine-3'-phosphate
  modified_base 15: mod_base = OTHER; note = 2'-O-methyladenosine-3'-phosphate
  modified_base 16: mod_base = OTHER; note = 2'-O-methyladenosine-3'-phosphate
  modified_base 17: mod_base = OTHER; note = 2'-O-methyluridine-3'-phosphate
  modified_base 18: mod_base = OTHER; note = 2'-O-methyladenosine-3'-phosphate
  modified_base 19: mod_base = OTHER; note = 2'-O-methylguanosine-3'-phosphate
  modified_base 20: mod_base = OTHER; note = 2'-O-methylcytidine-3'-phosphate
  modified_base 21: mod_base = OTHER; note = 2'-O-methyluridine-3'-phosphate ((2S,4R)-1-[29-[[2-(acetylamino)-2-deoxy-beta-D-galactopyra nosyl]oxy]-14,14-bis[[3-[[3-[[5-[[2-(acetylamino)-2-deoxy-b eta-D-galactopyranosyl]oxy]-1-oxopentyl]amino]propyl]amino] -3-oxopropoxy]methyl]-1,12,19,25-tetraoxo-16-oxa-13,20,24-t riazanonacos-1-yl]-4-hydroxy-2-pyrrolidinyl)methyl ester
gaattctaaggctaaatagct

SEQ ID NO: 666 - RNA, 23 nt, synthetic construct
  source 1..23: mol_type = other RNA
  modified_base 1: mod_base = OTHER; note = 2'-O-methyladenosine-3'-phosphorothioate
  modified_base 2: mod_base = OTHER; note = 2'-deoxy-2'-fluoroguanosine-3'-phosphorothioate
  modified_base 3: mod_base = OTHER; note = 2'-O-methylcytidine-3'-phosphate
  modified_base 4: mod_base = OTHER; note = 2'-O-methyluridine-3'-phosphate
  modified_base 5: mod_base = OTHER; note = 2'-O-methyladenosine-3'-phosphate
  modified_base 6: mod_base = OTHER; note = 2'-deoxy-2'-fluorouridine-3'-phosphate
  modified_base 7: mod_base = OTHER; note = 2'-O-methyluridine-3'-phosphate
  modified_base 8: mod_base = OTHER; note = 2'-deoxy-2'-fluorouridine-3'-phosphate
  modified_base 9: mod_base = OTHER; note = 2'-deoxy-2'-fluoroadenosine-3'-phosphate
  modified_base 10: mod_base = OTHER; note = 2'-O-methylguanosine-3'-phosphate
  modified_base 11: mod_base = OTHER; note = 2'-O-methylcytidine-3'-phosphate
  modified_base 12: mod_base = OTHER; note = 2'-O-methylcytidine-3'-phosphate
  modified_base 13: mod_base = OTHER; note = 2'-O-methyluridine-3'-phosphate
  modified_base 14: mod_base = OTHER; note = 2'-deoxy-2'-fluorouridine-3'-phosphate
  modified_base 15: mod_base = OTHER; note = 2'-O-methyladenosine-3'-phosphate
  modified_base 16: mod_base = OTHER; note = 2'-deoxy-2'-fluoroguanosine-3'-phosphate
  modified_base 17: mod_base = OTHER; note = 2'-O-methyladenosine-3'-phosphate
  modified_base 18: mod_base = OTHER; note = 2'-O-methyladenosine-3'-phosphate
  modified_base 19: mod_base = OTHER; note = 2'-O-methyluridine-3'-phosphate
  modified_base 20: mod_base = OTHER; note = 2'-O-methyluridine-3'-phosphate
  modified_base 21: mod_base = OTHER; note = 2'-O-methylcytidine-3'-phosphorothioate
  modified_base 22: mod_base = OTHER; note = 2'-O-methyluridine-3'-phosphorothioate
  modified_base 23: mod_base = OTHER; note = 2'-O-methylguanosine
agctatttagccttagaattctg

SEQ ID NO: 667 - RNA, 23 nt, synthetic construct
  source 1..23: mol_type = other RNA
  modified_base 6: mod_base = OTHER; note = 5'-methyluridine-3'-phosphate
  modified_base 7: mod_base = OTHER; note = 5'-methyluridine-3'-phosphate
  modified_base 9: mod_base = OTHER; note = 5'-methyluridine-3'-phosphate
  modified_base 15: mod_base = OTHER; note = 5'-methyluridine-3'-phosphate
  modified_base 19: mod_base = OTHER; note = 5'-methyluridine-3'-phosphate
  modified_base 23: mod_base = OTHER; note = 5'-methyluridine
cagaattctaaggctaaatagct

SEQ ID NO: 668-677 - skipped (10 entries)

SEQ ID NO: 678 - RNA, 21 nt, synthetic construct
  source 1..21: mol_type = other RNA
  modified_base 1: mod_base = OTHER; note = 2'-O-methyladenosine-3'-phosphorothioate
  modified_base 2: mod_base = OTHER; note = 2'-O-methyluridine-3'-phosphorothioate
  modified_base 3: mod_base = OTHER; note = 2'-O-methylguanosine-3'-phosphate
  modified_base 4: mod_base = OTHER; note = 2'-O-methylguanosine-3'-phosphate
  modified_base 5: mod_base = OTHER; note = 2'-O-methyluridine-3'-phosphate
  modified_base 6: mod_base = OTHER; note = 2'-O-methylcytidine-3'-phosphate
  modified_base 7: mod_base = OTHER; note = 2'-O-methyladenosine-3'-phosphate
  modified_base 8: mod_base = OTHER; note = 2'-O-methylguanosine-3'-phosphate
  modified_base 9: mod_base = OTHER; note = 2'-deoxy-2'-fluoroadenosine-3'-phosphate
  modified_base 10: mod_base = OTHER; note = 2'-O-methyluridine-3'-phosphate
  modified_base 11: mod_base = OTHER; note = 2'-deoxy-2'-fluorocytidine-3'-phosphate
  modified_base 12: mod_base = OTHER; note = 2'-O-methyluridine-3'-phosphate
  modified_base 13: mod_base = OTHER; note = 2'-O-methyluridine-3'-phosphate
  modified_base 14: mod_base = OTHER; note = 2'-O-methylcytidine-3'-phosphate
  modified_base 15: mod_base = OTHER; note = 2'-O-methyladenosine-3'-phosphate
  modified_base 16: mod_base = OTHER; note = 2'-O-methyladenosine-3'-phosphate
  modified_base 17: mod_base = OTHER; note = 2'-O-methyladenosine-3'-phosphate
  modified_base 18: mod_base = OTHER; note = 2'-O-methyladenosine-3'-phosphate
  modified_base 19: mod_base = OTHER; note = 2'-O-methyluridine-3'-phosphate
  modified_base 20: mod_base = OTHER; note = 2'-O-methyladenosine-3'-phosphate
  modified_base 21: mod_base = OTHER; note = 2'-O-methyladenosine-3'-phosphate ((2S,4R)-1-[29-[[2-(acetylamino)-2-deoxy-beta-D-galactopyra nosyl]oxy]-14,14-bis[[3-[[3-[[5-[[2-(acetylamino)-2-deoxy-b eta-D-galactopyranosyl]oxy]-1-oxopentyl]amino]propyl]amino] -3-oxopropoxy]methyl]-1,12,19,25-tetraoxo-16-oxa-13,20,24-t riazanonacos-1-yl]-4-hydroxy-2-pyrrolidinyl)methyl ester
atggtcagatcttcaaaataa

SEQ ID NO: 679 - RNA, 23 nt, synthetic construct
  source 1..23: mol_type = other RNA
  modified_base 1: mod_base = OTHER; note = 2'-O-methyluridine-3'-phosphorothioate
  modified_base 2: mod_base = OTHER; note = 2'-deoxy-2'-fluorouridine-3'-phosphorothioate
  modified_base 3: mod_base = OTHER; note = 2'-O-methyladenosine-3'-phosphate
  modified_base 4: mod_base = OTHER; note = 2'-O-methyluridine-3'-phosphate
  modified_base 5: mod_base = OTHER; note = 2'-O-methyluridine-3'-phosphate
  modified_base 6: mod_base = OTHER; note = 2'-O-methyluridine-3'-phosphate
  modified_base 7: mod_base = OTHER; note = Thymidine-glycol nucleic acid (GNA), S-Isomer
  modified_base 8: mod_base = OTHER; note = 2'-O-methylguanosine-3'-phosphate
  modified_base 9: mod_base = OTHER; note = 2'-O-methyladenosine-3'-phosphate
  modified_base 10: mod_base = OTHER; note = 2'-O-methyladenosine-3'-phosphate
  modified_base 11: mod_base = OTHER; note = 2'-O-methylguanosine-3'-phosphate
  modified_base 12: mod_base = OTHER; note = 2'-deoxy-2'-fluoroadenosine-3'-phosphate
  modified_base 13: mod_base = OTHER; note = 2'-O-methyluridine-3'-phosphate
  modified_base 14: mod_base = OTHER; note = 2'-deoxy-2'-fluorocytidine-3'-phosphate
  modified_base 15: mod_base = OTHER; note = 2'-O-methyluridine-3'-phosphate
  modified_base 16: mod_base = OTHER; note = 2'-deoxy-2'-fluoroguanosine-3'-phosphate
  modified_base 17: mod_base = OTHER; note = 2'-O-methyladenosine-3'-phosphate
  modified_base 18: mod_base = OTHER; note = 2'-O-methylcytidine-3'-phosphate
  modified_base 19: mod_base = OTHER; note = 2'-O-methylcytidine-3'-phosphate
  modified_base 20: mod_base = OTHER; note = 2'-O-methyladenosine-3'-phosphate
  modified_base 21: mod_base = OTHER; note = 2'-O-methyluridine-3'-phosphorothioate
  modified_base 22: mod_base = OTHER; note = 2'-O-methyluridine-3'-phosphorothioate
  modified_base 23: mod_base = OTHER; note = 2'-O-methylguanosine
ttattttgaagatctgaccattg

SEQ ID NO: 680 - RNA, 23 nt, synthetic construct
  source 1..23: mol_type = other RNA
  modified_base 4: mod_base = OTHER; note = 5'-methyluridine-3'-phosphate
  modified_base 7: mod_base = OTHER; note = 5'-methyluridine-3'-phosphate
  modified_base 12: mod_base = OTHER; note = 5'-methyluridine-3'-phosphate
  modified_base 14: mod_base = OTHER; note = 5'-methyluridine-3'-phosphate
  modified_base 15: mod_base = OTHER; note = 5'-methyluridine-3'-phosphate
  modified_base 21: mod_base = OTHER; note = 5'-methyluridine-3'-phosphate
caatggtcagatcttcaaaataa

SEQ ID NO: 681 - RNA, 21 nt, synthetic construct
  source 1..21: mol_type = other RNA
  modified_base 1: mod_base = OTHER; note = 2'-O-methyladenosine-3'-phosphorothioate
  modified_base 2: mod_base = OTHER; note = 2'-O-methyluridine-3'-phosphorothioate
  modified_base 3: mod_base = OTHER; note = 2'-O-methyladenosine-3'-phosphate
  modified_base 4: mod_base = OTHER; note = 2'-O-methylguanosine-3'-phosphate
  modified_base 5: mod_base = OTHER; note = 2'-O-methylcytidine-3'-phosphate
  modified_base 6: mod_base = OTHER; note = 2'-O-methyluridine-3'-phosphate
  modified_base 7: mod_base = OTHER; note = 2'-deoxy-2'-fluoroadenosine-3'-phosphate
  modified_base 8: mod_base = OTHER; note = 2'-O-methylguanosine-3'-phosphate
  modified_base 9: mod_base = OTHER; note = 2'-deoxy-2'-fluoroguanosine-3'-phosphate
  modified_base 10: mod_base = OTHER; note = 2'-deoxy-2'-fluoroadenosine-3'-phosphate
  modified_base 11: mod_base = OTHER; note = 2'-deoxy-2'-fluoroadenosine-3'-phosphate
  modified_base 12: mod_base = OTHER; note = 2'-O-methylguanosine-3'-phosphate
  modified_base 13: mod_base = OTHER; note = 2'-O-methyluridine-3'-phosphate
  modified_base 14: mod_base = OTHER; note = 2'-O-methyladenosine-3'-phosphate
  modified_base 15: mod_base = OTHER; note = 2'-O-methyluridine-3'-phosphate
  modified_base 16: mod_base = OTHER; note = 2'-O-methyluridine-3'-phosphate
  modified_base 17: mod_base = OTHER; note = 2'-O-methylcytidine-3'-phosphate
  modified_base 18: mod_base = OTHER; note = 2'-O-methyladenosine-3'-phosphate
  modified_base 19: mod_base = OTHER; note = 2'-O-methyluridine-3'-phosphate
  modified_base 20: mod_base = OTHER; note = 2'-O-methyluridine-3'-phosphate
  modified_base 21: mod_base = OTHER; note = 2'-O-methyladenosine-3'-phosphate ((2S,4R)-1-[29-[[2-(acetylamino)-2-deoxy-beta-D-galactopyra nosyl]oxy]-14,14-bis[[3-[[3-[[5-[[2-(acetylamino)-2-deoxy-b eta-D-galactopyranosyl]oxy]-1-oxopentyl]amino]propyl]amino] -3-oxopropoxy]methyl]-1,12,19,25-tetraoxo-16-oxa-13,20,24-t riazanonacos-1-yl]-4-hydroxy-2-pyrrolidinyl)methyl ester
atagctaggaagtattcatta

SEQ ID NO: 682 - RNA, 23 nt, synthetic construct
  source 1..23: mol_type = other RNA
  modified_base 1: mod_base = OTHER; note = 2'-O-methyluridine-3'-phosphorothioate
  modified_base 2: mod_base = OTHER; note = 2'-deoxy-2'-fluoroadenosine-3'-phosphorothioate
  modified_base 3: mod_base = OTHER; note = 2'-O-methyladenosine-3'-phosphate
  modified_base 4: mod_base = OTHER; note = 2'-O-methyluridine-3'-phosphate
  modified_base 5: mod_base = OTHER; note = 2'-O-methylguanosine-3'-phosphate
  modified_base 6: mod_base = OTHER; note = 2'-deoxy-2'-fluoroadenosine-3'-phosphate
  modified_base 7: mod_base = OTHER; note = 2'-O-methyladenosine-3'-phosphate
  modified_base 8: mod_base = OTHER; note = 2'-deoxy-2'-fluorouridine-3'-phosphate
  modified_base 9: mod_base = OTHER; note = 2'-deoxy-2'-fluoroadenosine-3'-phosphate
  modified_base 10: mod_base = OTHER; note = 2'-O-methylcytidine-3'-phosphate
  modified_base 11: mod_base = OTHER; note = 2'-O-methyluridine-3'-phosphate
  modified_base 12: mod_base = OTHER; note = 2'-O-methyluridine-3'-phosphate
  modified_base 13: mod_base = OTHER; note = 2'-O-methylcytidine-3'-phosphate
  modified_base 14: mod_base = OTHER; note = 2'-deoxy-2'-fluorocytidine-3'-phosphate
  modified_base 15: mod_base = OTHER; note = 2'-O-methyluridine-3'-phosphate
  modified_base 16: mod_base = OTHER; note = 2'-deoxy-2'-fluoroadenosine-3'-phosphate
  modified_base 17: mod_base = OTHER; note = 2'-O-methylguanosine-3'-phosphate
  modified_base 18: mod_base = OTHER; note = 2'-O-methylcytidine-3'-phosphate
  modified_base 19: mod_base = OTHER; note = 2'-O-methyluridine-3'-phosphate
  modified_base 20: mod_base = OTHER; note = 2'-O-methyladenosine-3'-phosphate
  modified_base 21: mod_base = OTHER; note = 2'-O-methyluridine-3'-phosphorothioate
  modified_base 22: mod_base = OTHER; note = 2'-O-methyluridine-3'-phosphorothioate
  modified_base 23: mod_base = OTHER; note = 2'-O-methyluridine
taatgaatacttcctagctattt

SEQ ID NO: 683 - RNA, 23 nt, synthetic construct
  source 1..23: mol_type = other RNA
  modified_base 4: mod_base = OTHER; note = 5'-methyluridine-3'-phosphate
  modified_base 8: mod_base = OTHER; note = 5'-methyluridine-3'-phosphate
  modified_base 15: mod_base = OTHER; note = 5'-methyluridine-3'-phosphate
  modified_base 17: mod_base = OTHER; note = 5'-methyluridine-3'-phosphate
  modified_base 18: mod_base = OTHER; note = 5'-methyluridine-3'-phosphate
  modified_base 21: mod_base = OTHER; note = 5'-methyluridine-3'-phosphate
  modified_base 22: mod_base = OTHER; note = 5'-methyluridine-3'-phosphate
aaatagctaggaagtattcatta

SEQ ID NO: 684 - RNA, 21 nt, synthetic construct
  source 1..21: mol_type = other RNA
  modified_base 1: mod_base = OTHER; note = 2'-O-methylcytidine-3'-phosphorothioate
  modified_base 2: mod_base = OTHER; note = 2'-O-methyladenosine-3'-phosphorothioate
  modified_base 3: mod_base = OTHER; note = 2'-O-methyluridine-3'-phosphate
  modified_base 4: mod_base = OTHER; note = 2'-O-methylguanosine-3'-phosphate
  modified_base 5: mod_base = OTHER; note = 2'-O-methyluridine-3'-phosphate
  modified_base 6: mod_base = OTHER; note = 2'-O-methylguanosine-3'-phosphate
  modified_base 7: mod_base = OTHER; note = 2'-deoxy-2'-fluorocytidine-3'-phosphate
  modified_base 8: mod_base = OTHER; note = 2'-O-methyladenosine-3'-phosphate
  modified_base 9: mod_base = OTHER; note = 2'-deoxy-2'-fluorocytidine-3'-phosphate
  modified_base 10: mod_base = OTHER; note = 2'-O-methyladenosine-3'-phosphate
  modified_base 11: mod_base = OTHER; note = 2'-deoxy-2'-fluorouridine-3'-phosphate
  modified_base 12: mod_base = OTHER; note = 2'-O-methyluridine-3'-phosphate
  modified_base 13: mod_base = OTHER; note = 2'-O-methylguanosine-3'-phosphate
  modified_base 14: mod_base = OTHER; note = 2'-O-methyladenosine-3'-phosphate
  modified_base 15: mod_base = OTHER; note = 2'-O-methyladenosine-3'-phosphate
  modified_base 16: mod_base = OTHER; note = 2'-O-methyladenosine-3'-phosphate
  modified_base 17: mod_base = OTHER; note = 2'-O-methyladenosine-3'-phosphate
  modified_base 18: mod_base = OTHER; note = 2'-O-methylcytidine-3'-phosphate
  modified_base 19: mod_base = OTHER; note = 2'-O-methyluridine-3'-phosphate
  modified_base 20: mod_base = OTHER; note = 2'-O-methylguanosine-3'-phosphate
  modified_base 21: mod_base = OTHER; note = 2'-O-methyluridine-3'-phosphate ((2S,4R)-1-[29-[[2-(acetylamino)-2-deoxy-beta-D-galactopyra nosyl]oxy]-14,14-bis[[3-[[3-[[5-[[2-(acetylamino)-2-deoxy-b eta-D-galactopyranosyl]oxy]-1-oxopentyl]amino]propyl]amino] -3-oxopropoxy]methyl]-1,12,19,25-tetraoxo-16-oxa-13,20,24-t riazanonacos-1-yl]-4-hydroxy-2-pyrrolidinyl)methyl ester
catgtgcacattgaaaactgt

SEQ ID NO: 685 - RNA, 23 nt, synthetic construct
  source 1..23: mol_type = other RNA
  modified_base 1: mod_base = OTHER; note = 2'-O-methyladenosine-3'-phosphorothioate
  modified_base 2: mod_base = OTHER; note = 2'-deoxy-2'-fluorocytidine-3'-phosphorothioate
  modified_base 3: mod_base = OTHER; note = 2'-O-methyladenosine-3'-phosphate
  modified_base 4: mod_base = OTHER; note = 2'-O-methylguanosine-3'-phosphate
  modified_base 5: mod_base = OTHER; note = 2'-O-methyluridine-3'-phosphate
  modified_base 6: mod_base = OTHER; note = Thymidine-glycol nucleic acid (GNA), S-Isomer
  modified_base 7: mod_base = OTHER; note = 2'-O-methyluridine-3'-phosphate
  modified_base 8: mod_base = OTHER; note = 2'-O-methyluridine-3'-phosphate
  modified_base 9: mod_base = OTHER; note = 2'-O-methylcytidine-3'-phosphate
  modified_base 10: mod_base = OTHER; note = 2'-O-methyladenosine-3'-phosphate
  modified_base 11: mod_base = OTHER; note = 2'-O-methyladenosine-3'-phosphate
  modified_base 12: mod_base = OTHER; note = 2'-deoxy-2'-fluorouridine-3'-phosphate
  modified_base 13: mod_base = OTHER; note = 2'-O-methylguanosine-3'-phosphate
  modified_base 14: mod_base = OTHER; note = 2'-deoxy-2'-fluorouridine-3'-phosphate
  modified_base 15: mod_base = OTHER; note = 2'-O-methylguanosine-3'-phosphate
  modified_base 16: mod_base = OTHER; note = 2'-deoxy-2'-fluorocytidine-3'-phosphate
  modified_base 17: mod_base = OTHER; note = 2'-O-methyladenosine-3'-phosphate
  modified_base 18: mod_base = OTHER; note = 2'-O-methylcytidine-3'-phosphate
  modified_base 19: mod_base = OTHER; note = 2'-O-methyladenosine-3'-phosphate
  modified_base 20: mod_base = OTHER; note = 2'-O-methyluridine-3'-phosphate
  modified_base 21: mod_base = OTHER; note = 2'-O-methylguanosine-3'-phosphorothioate
  modified_base 22: mod_base = OTHER; note = 2'-O-methylcytidine-3'-phosphorothioate
  modified_base 23: mod_base = OTHER; note = 2'-O-methylguanosine
acagttttcaatgtgcacatgcg

SEQ ID NO: 686 - RNA, 23 nt, synthetic construct
  source 1..23: mol_type = other RNA
  modified_base 5: mod_base = OTHER; note = 5'-methyluridine-3'-phosphate
  modified_base 7: mod_base = OTHER; note = 5'-methyluridine-3'-phosphate
  modified_base 13: mod_base = OTHER; note = 5'-methyluridine-3'-phosphate
  modified_base 14: mod_base = OTHER; note = 5'-methyluridine-3'-phosphate
  modified_base 21: mod_base = OTHER; note = 5'-methyluridine-3'-phosphate
  modified_base 23: mod_base = OTHER; note = 5'-methyluridine
cgcatgtgcacattgaaaactgt

SEQ ID NO: 687 - RNA, 21 nt, synthetic construct
  source 1..21: mol_type = other RNA
  modified_base 1: mod_base = OTHER; note = 2'-O-methylcytidine-3'-phosphorothioate
  modified_base 2: mod_base = OTHER; note = 2'-O-methyladenosine-3'-phosphorothioate
  modified_base 3: mod_base = OTHER; note = 2'-O-methyluridine-3'-phosphate
  modified_base 4: mod_base = OTHER; note = 2'-O-methylguanosine-3'-phosphate
  modified_base 5: mod_base = OTHER; note = 2'-O-methyluridine-3'-phosphate
  modified_base 6: mod_base = OTHER; note = 2'-O-methylguanosine-3'-phosphate
  modified_base 7: mod_base = OTHER; note = 2'-deoxy-2'-fluorocytidine-3'-phosphate
  modified_base 8: mod_base = OTHER; note = 2'-O-methyladenosine-3'-phosphate
  modified_base 9: mod_base = OTHER; note = 2'-deoxy-2'-fluorocytidine-3'-phosphate
  modified_base 10: mod_base = OTHER; note = 2'-O-methyladenosine-3'-phosphate
  modified_base 11: mod_base = OTHER; note = 2'-deoxy-2'-fluorouridine-3'-phosphate
  modified_base 12: mod_base = OTHER; note = 2'-O-methyluridine-3'-phosphate
  modified_base 13: mod_base = OTHER; note = 2'-O-methylguanosine-3'-phosphate
  modified_base 14: mod_base = OTHER; note = 2'-O-methyladenosine-3'-phosphate
  modified_base 15: mod_base = OTHER; note = 2'-O-methyladenosine-3'-phosphate
  modified_base 16: mod_base = OTHER; note = 2'-O-methyladenosine-3'-phosphate
  modified_base 17: mod_base = OTHER; note = 2'-O-methyladenosine-3'-phosphate
  modified_base 18: mod_base = OTHER; note = 2'-O-methylcytidine-3'-phosphate
  modified_base 19: mod_base = OTHER; note = 2'-O-methyluridine-3'-phosphate
  modified_base 20: mod_base = OTHER; note = 2'-O-methylguanosine-3'-phosphate
  modified_base 21: mod_base = OTHER; note = 2'-O-methyluridine-3'-phosphate ((2S,4R)-1-[29-[[2-(acetylamino)-2-deoxy-beta-D-galactopyra nosyl]oxy]-14,14-bis[[3-[[3-[[5-[[2-(acetylamino)-2-deoxy-b eta-D-galactopyranosyl]oxy]-1-oxopentyl]amino]propyl]amino] -3-oxopropoxy]methyl]-1,12,19,25-tetraoxo-16-oxa-13,20,24-t riazanonacos-1-yl]-4-hydroxy-2-pyrrolidinyl)methyl ester
catgtgcacattgaaaactgt

SEQ ID NO: 688 - RNA, 23 nt, synthetic construct
  source 1..23: mol_type = other RNA
  modified_base 1: mod_base = OTHER; note = 2'-O-methyladenosine-3'-phosphorothioate
  modified_base 2: mod_base = OTHER; note = 2'-deoxy-2'-fluorocytidine-3'-phosphorothioate
  modified_base 3: mod_base = OTHER; note = 2'-O-methyladenosine-3'-phosphate
  modified_base 4: mod_base = OTHER; note = 2'-O-methylguanosine-3'-phosphate
  modified_base 5: mod_base = OTHER; note = 2'-O-methyluridine-3'-phosphate
  modified_base 6: mod_base = OTHER; note = 2'-O-methyluridine-3'-phosphate
  modified_base 7: mod_base = OTHER; note = 2'-O-methyluridine-3'-phosphate
  modified_base 8: mod_base = OTHER; note = Thymidine-glycol nucleic acid (GNA), S-Isomer
  modified_base 9: mod_base = OTHER; note = 2'-O-methylcytidine-3'-phosphate
  modified_base 10: mod_base = OTHER; note = 2'-O-methyladenosine-3'-phosphate
  modified_base 11: mod_base = OTHER; note = 2'-O-methyladenosine-3'-phosphate
  modified_base 12: mod_base = OTHER; note = 2'-deoxy-2'-fluorouridine-3'-phosphate
  modified_base 13: mod_base = OTHER; note = 2'-O-methylguanosine-3'-phosphate
  modified_base 14: mod_base = OTHER; note = 2'-deoxy-2'-fluorouridine-3'-phosphate
  modified_base 15: mod_base = OTHER; note = 2'-O-methylguanosine-3'-phosphate
  modified_base 16: mod_base = OTHER; note = 2'-deoxy-2'-fluorocytidine-3'-phosphate
  modified_base 17: mod_base = OTHER; note = 2'-O-methyladenosine-3'-phosphate
  modified_base 18: mod_base = OTHER; note = 2'-O-methylcytidine-3'-phosphate
  modified_base 19: mod_base = OTHER; note = 2'-O-methyladenosine-3'-phosphate
  modified_base 20: mod_base = OTHER; note = 2'-O-methyluridine-3'-phosphate
  modified_base 21: mod_base = OTHER; note = 2'-O-methylguanosine-3'-phosphorothioate
  modified_base 22: mod_base = OTHER; note = 2'-O-methylcytidine-3'-phosphorothioate
  modified_base 23: mod_base = OTHER; note = 2'-O-methylguanosine
acagttttcaatgtgcacatgcg

SEQ ID NO: 689 - RNA, 23 nt, synthetic construct
  source 1..23: mol_type = other RNA
  modified_base 5: mod_base = OTHER; note = 5'-methyluridine-3'-phosphate
  modified_base 7: mod_base = OTHER; note = 5'-methyluridine-3'-phosphate
  modified_base 13: mod_base = OTHER; note = 5'-methyluridine-3'-phosphate
  modified_base 14: mod_base = OTHER; note = 5'-methyluridine-3'-phosphate
  modified_base 21: mod_base = OTHER; note = 5'-methyluridine-3'-phosphate
  modified_base 23: mod_base = OTHER; note = 5'-methyluridine
cgcatgtgcacattgaaaactgt

SEQ ID NO: 690 - RNA, 21 nt, synthetic construct
  source 1..21: mol_type = other RNA
  modified_base 1: mod_base = OTHER; note = 2'-O-methylcytidine-3'-phosphorothioate
  modified_base 2: mod_base = OTHER; note = 2'-O-methyladenosine-3'-phosphorothioate
  modified_base 3: mod_base = OTHER; note = 2'-O-methyluridine-3'-phosphate
  modified_base 4: mod_base = OTHER; note = 2'-O-methylguanosine-3'-phosphate
  modified_base 5: mod_base = OTHER; note = 2'-O-methyluridine-3'-phosphate
  modified_base 6: mod_base = OTHER; note = 2'-O-methylguanosine-3'-phosphate
  modified_base 7: mod_base = OTHER; note = 2'-deoxy-2'-fluorocytidine-3'-phosphate
  modified_base 8: mod_base = OTHER; note = 2'-O-methyladenosine-3'-phosphate
  modified_base 9: mod_base = OTHER; note = 2'-deoxy-2'-fluorocytidine-3'-phosphate
  modified_base 10: mod_base = OTHER; note = 2'-O-methyladenosine-3'-phosphate
  modified_base 11: mod_base = OTHER; note = 2'-deoxy-2'-fluorouridine-3'-phosphate
  modified_base 12: mod_base = OTHER; note = 2'-O-methyluridine-3'-phosphate
  modified_base 13: mod_base = OTHER; note = 2'-O-methylguanosine-3'-phosphate
  modified_base 14: mod_base = OTHER; note = 2'-O-methyladenosine-3'-phosphate
  modified_base 15: mod_base = OTHER; note = 2'-O-methyladenosine-3'-phosphate
  modified_base 16: mod_base = OTHER; note = 2'-O-methyladenosine-3'-phosphate
  modified_base 17: mod_base = OTHER; note = 2'-O-methyladenosine-3'-phosphate
  modified_base 18: mod_base = OTHER; note = 2'-O-methylcytidine-3'-phosphate
  modified_base 19: mod_base = OTHER; note = 2'-O-methyluridine-3'-phosphate
  modified_base 20: mod_base = OTHER; note = 2'-O-methylguanosine-3'-phosphate
  modified_base 21: mod_base = OTHER; note = 2'-O-methyluridine-3'-phosphate ((2S,4R)-1-[29-[[2-(acetylamino)-2-deoxy-beta-D-galactopyra nosyl]oxy]-14,14-bis[[3-[[3-[[5-[[2-(acetylamino)-2-deoxy-b eta-D-galactopyranosyl]oxy]-1-oxopentyl]amino]propyl]amino] -3-oxopropoxy]methyl]-1,12,19,25-tetraoxo-16-oxa-13,20,24-t riazanonacos-1-yl]-4-hydroxy-2-pyrrolidinyl)methyl ester
catgtgcacattgaaaactgt

SEQ ID NO: 691 - RNA, 23 nt, synthetic construct
  source 1..23: mol_type = other RNA
  modified_base 1: mod_base = OTHER; note = 2'-O-methyladenosine-3'-phosphorothioate
  modified_base 2: mod_base = OTHER; note = 2'-deoxy-2'-fluorocytidine-3'-phosphorothioate
  modified_base 3: mod_base = OTHER; note = 2'-O-methyladenosine-3'-phosphate
  modified_base 4: mod_base = OTHER; note = 2'-O-methylguanosine-3'-phosphate
  modified_base 5: mod_base = OTHER; note = 2'-O-methyluridine-3'-phosphate
  modified_base 6: mod_base = OTHER; note = 2'-O-methyluridine-3'-phosphate
  modified_base 7: mod_base = OTHER; note = Thymidine-glycol nucleic acid (GNA), S-Isomer
  modified_base 8: mod_base = OTHER; note = 2'-O-methyluridine-3'-phosphate
  modified_base 9: mod_base = OTHER; note = 2'-O-methylcytidine-3'-phosphate
  modified_base 10: mod_base = OTHER; note = 2'-O-methyladenosine-3'-phosphate
  modified_base 11: mod_base = OTHER; note = 2'-O-methyladenosine-3'-phosphate
  modified_base 12: mod_base = OTHER; note = 2'-deoxy-2'-fluorouridine-3'-phosphate
  modified_base 13: mod_base = OTHER; note = 2'-O-methylguanosine-3'-phosphate
  modified_base 14: mod_base = OTHER; note = 2'-deoxy-2'-fluorouridine-3'-phosphate
  modified_base 15: mod_base = OTHER; note = 2'-O-methylguanosine-3'-phosphate
  modified_base 16: mod_base = OTHER; note = 2'-deoxy-2'-fluorocytidine-3'-phosphate
  modified_base 17: mod_base = OTHER; note = 2'-O-methyladenosine-3'-phosphate
  modified_base 18: mod_base = OTHER; note = 2'-O-methylcytidine-3'-phosphate
  modified_base 19: mod_base = OTHER; note = 2'-O-methyladenosine-3'-phosphate
  modified_base 20: mod_base = OTHER; note = 2'-O-methyluridine-3'-phosphate
  modified_base 21: mod_base = OTHER; note = 2'-O-methylguanosine-3'-phosphorothioate
  modified_base 22: mod_base = OTHER; note = 2'-O-methylcytidine-3'-phosphorothioate
  modified_base 23: mod_base = OTHER; note = 2'-O-methylguanosine
acagttttcaatgtgcacatgcg

SEQ ID NO: 692 - RNA, 23 nt, synthetic construct
  source 1..23: mol_type = other RNA
  modified_base 5: mod_base = OTHER; note = 5'-methyluridine-3'-phosphate
  modified_base 7: mod_base = OTHER; note = 5'-methyluridine-3'-phosphate
  modified_base 13: mod_base = OTHER; note = 5'-methyluridine-3'-phosphate
  modified_base 14: mod_base = OTHER; note = 5'-methyluridine-3'-phosphate
  modified_base 21: mod_base = OTHER; note = 5'-methyluridine-3'-phosphate
  modified_base 23: mod_base = OTHER; note = 5'-methyluridine
cgcatgtgcacattgaaaactgt

SEQ ID NO: 693 - RNA, 21 nt, synthetic construct
  source 1..21: mol_type = other RNA
  modified_base 1: mod_base = OTHER; note = 2'-O-methyladenosine-3'-phosphorothioate
  modified_base 2: mod_base = OTHER; note = 2'-O-methyluridine-3'-phosphorothioate
  modified_base 3: mod_base = OTHER; note = 2'-O-methyluridine-3'-phosphate
  modified_base 4: mod_base = OTHER; note = 2'-O-methylcytidine-3'-phosphate
  modified_base 5: mod_base = OTHER; note = 2'-O-methyladenosine-3'-phosphate
  modified_base 6: mod_base = OTHER; note = 2'-O-methyluridine-3'-phosphate
  modified_base 7: mod_base = OTHER; note = 2'-deoxy-2'-fluorouridine-3'-phosphate
  modified_base 8: mod_base = OTHER; note = 2'-O-methylcytidine-3'-phosphate
  modified_base 9: mod_base = OTHER; note = 2'-deoxy-2'-fluoroadenosine-3'-phosphate
  modified_base 10: mod_base = OTHER; note = 2'-deoxy-2'-fluoroadenosine-3'-phosphate
  modified_base 11: mod_base = OTHER; note = 2'-deoxy-2'-fluoroadenosine-3'-phosphate
  modified_base 12: mod_base = OTHER; note = 2'-O-methylcytidine-3'-phosphate
  modified_base 13: mod_base = OTHER; note = 2'-O-methyluridine-3'-phosphate
  modified_base 14: mod_base = OTHER; note = 2'-O-methyluridine-3'-phosphate
  modified_base 15: mod_base = OTHER; note = 2'-O-methylguanosine-3'-phosphate
  modified_base 16: mod_base = OTHER; note = 2'-O-methyladenosine-3'-phosphate
  modified_base 17: mod_base = OTHER; note = 2'-O-methyladenosine-3'-phosphate
  modified_base 18: mod_base = OTHER; note = 2'-O-methyluridine-3'-phosphate
  modified_base 19: mod_base = OTHER; note = 2'-O-methyladenosine-3'-phosphate
  modified_base 20: mod_base = OTHER; note = 2'-O-methyluridine-3'-phosphate
  modified_base 21: mod_base = OTHER; note = 2'-O-methyluridine-3'-phosphate ((2S,4R)-1-[29-[[2-(acetylamino)-2-deoxy-beta-D-galactopyra nosyl]oxy]-14,14-bis[[3-[[3-[[5-[[2-(acetylamino)-2-deoxy-b eta-D-galactopyranosyl]oxy]-1-oxopentyl]amino]propyl]amino] -3-oxopropoxy]methyl]-1,12,19,25-tetraoxo-16-oxa-13,20,24-t riazanonacos-1-yl]-4-hydroxy-2-pyrrolidinyl)methyl ester
attcattcaaacttgaatatt

SEQ ID NO: 694 - RNA, 23 nt, synthetic construct
  source 1..23: mol_type = other RNA
  modified_base 1: mod_base = OTHER; note = 2'-O-methyladenosine-3'-phosphorothioate
  modified_base 2: mod_base = OTHER; note = 2'-deoxy-2'-fluoroadenosine-3'-phosphorothioate
  modified_base 3: mod_base = OTHER; note = 2'-O-methyluridine-3'-phosphate
  modified_base 4: mod_base = OTHER; note = 2'-O-methyladenosine-3'-phosphate
  modified_base 5: mod_base = OTHER; note = 2'-O-methyluridine-3'-phosphate
  modified_base 6: mod_base = OTHER; note = 2'-deoxy-2'-fluorouridine-3'-phosphate
  modified_base 7: mod_base = OTHER; note = 2'-O-methylcytidine-3'-phosphate
  modified_base 8: mod_base = OTHER; note = 2'-deoxy-2'-fluoroadenosine-3'-phosphate
  modified_base 9: mod_base = OTHER; note = 2'-deoxy-2'-fluoroadenosine-3'-phosphate
  modified_base 10: mod_base = OTHER; note = 2'-O-methylguanosine-3'-phosphate
  modified_base 11: mod_base = OTHER; note = 2'-O-methyluridine-3'-phosphate
  modified_base 12: mod_base = OTHER; note = 2'-O-methyluridine-3'-phosphate
  modified_base 13: mod_base = OTHER; note = 2'-O-methyluridine-3'-phosphate
  modified_base 14: mod_base = OTHER; note = 2'-deoxy-2'-fluoroguanosine-3'-phosphate
  modified_base 15: mod_base = OTHER; note = 2'-O-methyladenosine-3'-phosphate
  modified_base 16: mod_base = OTHER; note = 2'-deoxy-2'-fluoroadenosine-3'-phosphate
  modified_base 17: mod_base = OTHER; note = 2'-O-methyluridine-3'-phosphate
  modified_base 18: mod_base = OTHER; note = 2'-O-methylguanosine-3'-phosphate
  modified_base 19: mod_base = OTHER; note = 2'-O-methyladenosine-3'-phosphate
  modified_base 20: mod_base = OTHER; note = 2'-O-methyladenosine-3'-phosphate
  modified_base 21: mod_base = OTHER; note = 2'-O-methyluridine-3'-phosphorothioate
  modified_base 22: mod_base = OTHER; note = 2'-O-methyladenosine-3'-phosphorothioate
  modified_base 23: mod_base = OTHER; note = 2'-O-methylcytidine
aatattcaagtttgaatgaatac

SEQ ID NO: 695 - RNA, 23 nt, synthetic construct
  source 1..23: mol_type = other RNA
  modified_base 2: mod_base = OTHER; note = 5'-methyluridine-3'-phosphate
  modified_base 4: mod_base = OTHER; note = 5'-methyluridine-3'-phosphate
  modified_base 5: mod_base = OTHER; note = 5'-methyluridine-3'-phosphate
  modified_base 8: mod_base = OTHER; note = 5'-methyluridine-3'-phosphate
  modified_base 9: mod_base = OTHER; note = 5'-methyluridine-3'-phosphate
  modified_base 15: mod_base = OTHER; note = 5'-methyluridine-3'-phosphate
  modified_base 16: mod_base = OTHER; note = 5'-methyluridine-3'-phosphate
  modified_base 20: mod_base = OTHER; note = 5'-methyluridine-3'-phosphate
  modified_base 22: mod_base = OTHER; note = 5'-methyluridine-3'-phosphate
  modified_base 23: mod_base = OTHER; note = 5'-methyluridine
gtattcattcaaacttgaatatt

SEQ ID NO: 696 - RNA, 21 nt, synthetic construct
  source 1..21: mol_type = other RNA
  modified_base 1: mod_base = OTHER; note = 2'-O-methyladenosine-3'-phosphorothioate
  modified_base 2: mod_base = OTHER; note = 2'-O-methylcytidine-3'-phosphorothioate
  modified_base 3: mod_base = OTHER; note = 2'-O-methyluridine-3'-phosphate
  modified_base 4: mod_base = OTHER; note = 2'-O-methyluridine-3'-phosphate
  modified_base 5: mod_base = OTHER; note = 2'-O-methylguanosine-3'-phosphate
  modified_base 6: mod_base = OTHER; note = 2'-O-methyladenosine-3'-phosphate
  modified_base 7: mod_base = OTHER; note = 2'-deoxy-2'-fluoroadenosine-3'-phosphate
  modified_base 8: mod_base = OTHER; note = 2'-O-methyluridine-3'-phosphate
  modified_base 9: mod_base = OTHER; note = 2'-deoxy-2'-fluoroadenosine-3'-phosphate
  modified_base 10: mod_base = OTHER; note = 2'-deoxy-2'-fluorouridine-3'-phosphate
  modified_base 11: mod_base = OTHER; note = 2'-deoxy-2'-fluorouridine-3'-phosphate
  modified_base 12: mod_base = OTHER; note = 2'-O-methylcytidine-3'-phosphate
  modified_base 13: mod_base = OTHER; note = 2'-O-methyluridine-3'-phosphate
  modified_base 14: mod_base = OTHER; note = 2'-O-methyluridine-3'-phosphate
  modified_base 15: mod_base = OTHER; note = 2'-O-methylcytidine-3'-phosphate
  modified_base 16: mod_base = OTHER; note = 2'-O-methyladenosine-3'-phosphate
  modified_base 17: mod_base = OTHER; note = 2'-O-methyladenosine-3'-phosphate
  modified_base 18: mod_base = OTHER; note = 2'-O-methyladenosine-3'-phosphate
  modified_base 19: mod_base = OTHER; note = 2'-O-methylguanosine-3'-phosphate
  modified_base 20: mod_base = OTHER; note = 2'-O-methyladenosine-3'-phosphate
  modified_base 21: mod_base = OTHER; note = 2'-O-methyladenosine-3'-phosphate ((2S,4R)-1-[29-[[2-(acetylamino)-2-deoxy-beta-D-galactopyra nosyl]oxy]-14,14-bis[[3-[[3-[[5-[[2-(acetylamino)-2-deoxy-b eta-D-galactopyranosyl]oxy]-1-oxopentyl]amino]propyl]amino] -3-oxopropoxy]methyl]-1,12,19,25-tetraoxo-16-oxa-13,20,24-t riazanonacos-1-yl]-4-hydroxy-2-pyrrolidinyl)methyl ester
acttgaatattcttcaaagaa

SEQ ID NO: 697 - RNA, 23 nt, synthetic construct
  source 1..23: mol_type = other RNA
  modified_base 1: mod_base = OTHER; note = 2'-O-methyluridine-3'-phosphorothioate
  modified_base 2: mod_base = OTHER; note = 2'-deoxy-2'-fluorouridine-3'-phosphorothioate
  modified_base 3: mod_base = OTHER; note = 2'-O-methylcytidine-3'-phosphate
  modified_base 4: mod_base = OTHER; note = 2'-O-methyluridine-3'-phosphate
  modified_base 5: mod_base = OTHER; note = 2'-O-methyluridine-3'-phosphate
  modified_base 6: mod_base = OTHER; note = 2'-deoxy-2'-fluorouridine-3'-phosphate
  modified_base 7: mod_base = OTHER; note = 2'-O-methylguanosine-3'-phosphate
  modified_base 8: mod_base = OTHER; note = 2'-deoxy-2'-fluoroadenosine-3'-phosphate
  modified_base 9: mod_base = OTHER; note = 2'-deoxy-2'-fluoroadenosine-3'-phosphate
  modified_base 10: mod_base = OTHER; note = 2'-O-methylguanosine-3'-phosphate
  modified_base 11: mod_base = OTHER; note = 2'-O-methyladenosine-3'-phosphate
  modified_base 12: mod_base = OTHER; note = 2'-O-methyladenosine-3'-phosphate
  modified_base 13: mod_base = OTHER; note = 2'-O-methyluridine-3'-phosphate
  modified_base 14: mod_base = OTHER; note = 2'-deoxy-2'-fluoroadenosine-3'-phosphate
  modified_base 15: mod_base = OTHER; note = 2'-O-methyluridine-3'-phosphate
  modified_base 16: mod_base = OTHER; note = 2'-deoxy-2'-fluorouridine-3'-phosphate
  modified_base 17: mod_base = OTHER; note = 2'-O-methylcytidine-3'-phosphate
  modified_base 18: mod_base = OTHER; note = 2'-O-methyladenosine-3'-phosphate
  modified_base 19: mod_base = OTHER; note = 2'-O-methyladenosine-3'-phosphate
  modified_base 20: mod_base = OTHER; note = 2'-O-methylguanosine-3'-phosphate
  modified_base 21: mod_base = OTHER; note = 2'-O-methyluridine-3'-phosphorothioate
  modified_base 22: mod_base = OTHER; note = 2'-O-methyluridine-3'-phosphorothioate
  modified_base 23: mod_base = OTHER; note = 2'-O-methyluridine
ttctttgaagaatattcaagttt

SEQ ID NO: 698 - RNA, 23 nt, synthetic construct
  source 1..23: mol_type = other RNA
  modified_base 5: mod_base = OTHER; note = 5'-methyluridine-3'-phosphate
  modified_base 6: mod_base = OTHER; note = 5'-methyluridine-3'-phosphate
  modified_base 10: mod_base = OTHER; note = 5'-methyluridine-3'-phosphate
  modified_base 12: mod_base = OTHER; note = 5'-methyluridine-3'-phosphate
  modified_base 13: mod_base = OTHER; note = 5'-methyluridine-3'-phosphate
  modified_base 15: mod_base = OTHER; note = 5'-methyluridine-3'-phosphate
  modified_base 16: mod_base = OTHER; note = 5'-methyluridine-3'-phosphate
aaacttgaatattcttcaaagaa

SEQ ID NO: 699 - RNA, 21 nt, synthetic construct
  source 1..21: mol_type = other RNA
  modified_base 1: mod_base = OTHER; note = 2'-O-methyladenosine-3'-phosphorothioate
  modified_base 2: mod_base = OTHER; note = 2'-O-methyluridine-3'-phosphorothioate
  modified_base 3: mod_base = OTHER; note = 2'-O-methylguanosine-3'-phosphate
  modified_base 4: mod_base = OTHER; note = 2'-O-methylguanosine-3'-phosphate
  modified_base 5: mod_base = OTHER; note = 2'-O-methyluridine-3'-phosphate
  modified_base 6: mod_base = OTHER; note = 2'-O-methylcytidine-3'-phosphate
  modified_base 7: mod_base = OTHER; note = 2'-deoxy-2'-fluoroadenosine-3'-phosphate
  modified_base 8: mod_base = OTHER; note = 2'-O-methylguanosine-3'-phosphate
  modified_base 9: mod_base = OTHER; note = 2'-deoxy-2'-fluoroadenosine-3'-phosphate
  modified_base 10: mod_base = OTHER; note = 2'-O-methyluridine-3'-phosphate
  modified_base 11: mod_base = OTHER; note = 2'-deoxy-2'-fluorocytidine-3'-phosphate
  modified_base 12: mod_base = OTHER; note = 2'-O-methyluridine-3'-phosphate
  modified_base 13: mod_base = OTHER; note = 2'-O-methyluridine-3'-phosphate
  modified_base 14: mod_base = OTHER; note = 2'-O-methylcytidine-3'-phosphate
  modified_base 15: mod_base = OTHER; note = 2'-O-methyladenosine-3'-phosphate
  modified_base 16: mod_base = OTHER; note = 2'-O-methyladenosine-3'-phosphate
  modified_base 17: mod_base = OTHER; note = 2'-O-methyladenosine-3'-phosphate
  modified_base 18: mod_base = OTHER; note = 2'-O-methyladenosine-3'-phosphate
  modified_base 19: mod_base = OTHER; note = 2'-O-methyluridine-3'-phosphate
  modified_base 20: mod_base = OTHER; note = 2'-O-methyladenosine-3'-phosphate
  modified_base 21: mod_base = OTHER; note = 2'-O-methyladenosine-3'-phosphate ((2S,4R)-1-[29-[[2-(acetylamino)-2-deoxy-beta-D-galactopyra nosyl]oxy]-14,14-bis[[3-[[3-[[5-[[2-(acetylamino)-2-deoxy-b eta-D-galactopyranosyl]oxy]-1-oxopentyl]amino]propyl]amino] -3-oxopropoxy]methyl]-1,12,19,25-tetraoxo-16-oxa-13,20,24-t riazanonacos-1-yl]-4-hydroxy-2-pyrrolidinyl)methyl ester
atggtcagatcttcaaaataa

SEQ ID NO: 700 - RNA, 23 nt, synthetic construct
  source 1..23: mol_type = other RNA
  modified_base 1: mod_base = OTHER; note = 2'-O-methyluridine-3'-phosphorothioate
  modified_base 2: mod_base = OTHER; note = 2'-deoxy-2'-fluorouridine-3'-phosphorothioate
  modified_base 3: mod_base = OTHER; note = 2'-O-methyladenosine-3'-phosphate
  modified_base 4: mod_base = OTHER; note = 2'-O-methyluridine-3'-phosphate
  modified_base 5: mod_base = OTHER; note = 2'-O-methyluridine-3'-phosphate
  modified_base 6: mod_base = OTHER; note = 2'-O-methyluridine-3'-phosphate
  modified_base 7: mod_base = OTHER; note = Thymidine-glycol nucleic acid (GNA), S-Isomer
  modified_base 8: mod_base = OTHER; note = 2'-O-methylguanosine-3'-phosphate
  modified_base 9: mod_base = OTHER; note = 2'-O-methyladenosine-3'-phosphate
  modified_base 10: mod_base = OTHER; note = 2'-O-methyladenosine-3'-phosphate
  modified_base 11: mod_base = OTHER; note = 2'-O-methylguanosine-3'-phosphate
  modified_base 12: mod_base = OTHER; note = 2'-deoxy-2'-fluoroadenosine-3'-phosphate
  modified_base 13: mod_base = OTHER; note = 2'-O-methyluridine-3'-phosphate
  modified_base 14: mod_base = OTHER; note = 2'-deoxy-2'-fluorocytidine-3'-phosphate
  modified_base 15: mod_base = OTHER; note = 2'-O-methyluridine-3'-phosphate
  modified_base 16: mod_base = OTHER; note = 2'-deoxy-2'-fluoroguanosine-3'-phosphate
  modified_base 17: mod_base = OTHER; note = 2'-O-methyladenosine-3'-phosphate
  modified_base 18: mod_base = OTHER; note = 2'-O-methylcytidine-3'-phosphate
  modified_base 19: mod_base = OTHER; note = 2'-O-methylcytidine-3'-phosphate
  modified_base 20: mod_base = OTHER; note = 2'-O-methyladenosine-3'-phosphate
  modified_base 21: mod_base = OTHER; note = 2'-O-methyluridine-3'-phosphorothioate
  modified_base 22: mod_base = OTHER; note = 2'-O-methyluridine-3'-phosphorothioate
  modified_base 23: mod_base = OTHER; note = 2'-O-methylguanosine
ttattttgaagatctgaccattg

SEQ ID NO: 701 - RNA, 23 nt, synthetic construct
  source 1..23: mol_type = other RNA
  modified_base 4: mod_base = OTHER; note = 5'-methyluridine-3'-phosphate
  modified_base 7: mod_base = OTHER; note = 5'-methyluridine-3'-phosphate
  modified_base 12: mod_base = OTHER; note = 5'-methyluridine-3'-phosphate
  modified_base 14: mod_base = OTHER; note = 5'-methyluridine-3'-phosphate
  modified_base 15: mod_base = OTHER; note = 5'-methyluridine-3'-phosphate
  modified_base 21: mod_base = OTHER; note = 5'-methyluridine-3'-phosphate
caatggtcagatcttcaaaataa

SEQ ID NO: 702 - RNA, 21 nt, synthetic construct
  source 1..21: mol_type = other RNA
  modified_base 1: mod_base = OTHER; note = 2'-O-methyladenosine-3'-phosphorothioate
  modified_base 2: mod_base = OTHER; note = 2'-O-methyluridine-3'-phosphorothioate
  modified_base 3: mod_base = OTHER; note = 2'-O-methylguanosine-3'-phosphate
  modified_base 4: mod_base = OTHER; note = 2'-O-methyluridine-3'-phosphate
  modified_base 5: mod_base = OTHER; note = 2'-O-methylguanosine-3'-phosphate
  modified_base 6: mod_base = OTHER; note = 2'-O-methylcytidine-3'-phosphate
  modified_base 7: mod_base = OTHER; note = 2'-deoxy-2'-fluoroadenosine-3'-phosphate
  modified_base 8: mod_base = OTHER; note = 2'-O-methylcytidine-3'-phosphate
  modified_base 9: mod_base = OTHER; note = 2'-deoxy-2'-fluoroadenosine-3'-phosphate
  modified_base 10: mod_base = OTHER; note = 2'-deoxy-2'-fluorouridine-3'-phosphate
  modified_base 11: mod_base = OTHER; note = 2'-deoxy-2'-fluorouridine-3'-phosphate
  modified_base 12: mod_base = OTHER; note = 2'-O-methylguanosine-3'-phosphate
  modified_base 13: mod_base = OTHER; note = 2'-O-methyladenosine-3'-phosphate
  modified_base 14: mod_base = OTHER; note = 2'-O-methyladenosine-3'-phosphate
  modified_base 15: mod_base = OTHER; note = 2'-O-methyladenosine-3'-phosphate
  modified_base 16: mod_base = OTHER; note = 2'-O-methyladenosine-3'-phosphate
  modified_base 17: mod_base = OTHER; note = 2'-O-methylcytidine-3'-phosphate
  modified_base 18: mod_base = OTHER; note = 2'-O-methyluridine-3'-phosphate
  modified_base 19: mod_base = OTHER; note = 2'-O-methylguanosine-3'-phosphate
  modified_base 20: mod_base = OTHER; note = 2'-O-methyluridine-3'-phosphate
  modified_base 21: mod_base = OTHER; note = 2'-O-methyladenosine-3'-phosphate ((2S,4R)-1-[29-[[2-(acetylamino)-2-deoxy-beta-D-galactopyra nosyl]oxy]-14,14-bis[[3-[[3-[[5-[[2-(acetylamino)-2-deoxy-b eta-D-galactopyranosyl]oxy]-1-oxopentyl]amino]propyl]amino] -3-oxopropoxy]methyl]-1,12,19,25-tetraoxo-16-oxa-13,20,24-t riazanonacos-1-yl]-4-hydroxy-2-pyrrolidinyl)methyl ester
atgtgcacattgaaaactgta

SEQ ID NO: 703 - RNA, 23 nt, synthetic construct
  source 1..23: mol_type = other RNA
  modified_base 1: mod_base = OTHER; note = 2'-O-methyluridine-3'-phosphorothioate
  modified_base 2: mod_base = OTHER; note = 2'-deoxy-2'-fluoroadenosine-3'-phosphorothioate
  modified_base 3: mod_base = OTHER; note = 2'-O-methylcytidine-3'-phosphate
  modified_base 4: mod_base = OTHER; note = 2'-O-methyladenosine-3'-phosphate
  modified_base 5: mod_base = OTHER; note = 2'-O-methylguanosine-3'-phosphate
  modified_base 6: mod_base = OTHER; note = 2'-deoxy-2'-fluorouridine-3'-phosphate
  modified_base 7: mod_base = OTHER; note = 2'-O-methyluridine-3'-phosphate
  modified_base 8: mod_base = OTHER; note = 2'-deoxy-2'-fluorouridine-3'-phosphate
  modified_base 9: mod_base = OTHER; note = 2'-deoxy-2'-fluorouridine-3'-phosphate
  modified_base 10: mod_base = OTHER; note = 2'-O-methylcytidine-3'-phosphate
  modified_base 11: mod_base = OTHER; note = 2'-O-methyladenosine-3'-phosphate
  modified_base 12: mod_base = OTHER; note = 2'-O-methyladenosine-3'-phosphate
  modified_base 13: mod_base = OTHER; note = 2'-O-methyluridine-3'-phosphate
  modified_base 14: mod_base = OTHER; note = 2'-deoxy-2'-fluoroguanosine-3'-phosphate
  modified_base 15: mod_base = OTHER; note = 2'-O-methyluridine-3'-phosphate
  modified_base 16: mod_base = OTHER; note = 2'-deoxy-2'-fluoroguanosine-3'-phosphate
  modified_base 17: mod_base = OTHER; note = 2'-O-methylcytidine-3'-phosphate
  modified_base 18: mod_base = OTHER; note = 2'-O-methyladenosine-3'-phosphate
  modified_base 19: mod_base = OTHER; note = 2'-O-methylcytidine-3'-phosphate
  modified_base 20: mod_base = OTHER; note = 2'-O-methyladenosine-3'-phosphate
  modified_base 21: mod_base = OTHER; note = 2'-O-methyluridine-3'-phosphorothioate
  modified_base 22: mod_base = OTHER; note = 2'-O-methylguanosine-3'-phosphorothioate
  modified_base 23: mod_base = OTHER; note = 2'-O-methylcytidine
tacagttttcaatgtgcacatgc

SEQ ID NO: 704 - RNA, 23 nt, synthetic construct
  source 1..23: mol_type = other RNA
  modified_base 4: mod_base = OTHER; note = 5'-methyluridine-3'-phosphate
  modified_base 6: mod_base = OTHER; note = 5'-methyluridine-3'-phosphate
  modified_base 12: mod_base = OTHER; note = 5'-methyluridine-3'-phosphate
  modified_base 13: mod_base = OTHER; note = 5'-methyluridine-3'-phosphate
  modified_base 20: mod_base = OTHER; note = 5'-methyluridine-3'-phosphate
  modified_base 22: mod_base = OTHER; note = 5'-methyluridine-3'-phosphate
gcatgtgcacattgaaaactgta

SEQ ID NO: 705 - RNA, 21 nt, synthetic construct
  source 1..21: mol_type = other RNA
  modified_base 1: mod_base = OTHER; note = 2'-O-methyladenosine-3'-phosphorothioate
  modified_base 2: mod_base = OTHER; note = 2'-O-methyluridine-3'-phosphorothioate
  modified_base 3: mod_base = OTHER; note = 2'-O-methylguanosine-3'-phosphate
  modified_base 4: mod_base = OTHER; note = 2'-O-methylguanosine-3'-phosphate
  modified_base 5: mod_base = OTHER; note = 2'-O-methyluridine-3'-phosphate
  modified_base 6: mod_base = OTHER; note = 2'-O-methylcytidine-3'-phosphate
  modified_base 7: mod_base = OTHER; note = 2'-deoxy-2'-fluoroadenosine-3'-phosphate
  modified_base 8: mod_base = OTHER; note = 2'-O-methylguanosine-3'-phosphate
  modified_base 9: mod_base = OTHER; note = 2'-deoxy-2'-fluoroadenosine-3'-phosphate
  modified_base 10: mod_base = OTHER; note = 2'-O-methyluridine-3'-phosphate
  modified_base 11: mod_base = OTHER; note = 2'-deoxy-2'-fluorocytidine-3'-phosphate
  modified_base 12: mod_base = OTHER; note = 2'-O-methyluridine-3'-phosphate
  modified_base 13: mod_base = OTHER; note = 2'-O-methyluridine-3'-phosphate
  modified_base 14: mod_base = OTHER; note = 2'-O-methylcytidine-3'-phosphate
  modified_base 15: mod_base = OTHER; note = 2'-O-methyladenosine-3'-phosphate
  modified_base 16: mod_base = OTHER; note = 2'-O-methyladenosine-3'-phosphate
  modified_base 17: mod_base = OTHER; note = 2'-O-methyladenosine-3'-phosphate
  modified_base 18: mod_base = OTHER; note = 2'-O-methyladenosine-3'-phosphate
  modified_base 19: mod_base = OTHER; note = 2'-O-methyluridine-3'-phosphate
  modified_base 20: mod_base = OTHER; note = 2'-O-methyladenosine-3'-phosphate
  modified_base 21: mod_base = OTHER; note = 2'-O-methyladenosine-3'-phosphate ((2S,4R)-1-[29-[[2-(acetylamino)-2-deoxy-beta-D-galactopyra nosyl]oxy]-14,14-bis[[3-[[3-[[5-[[2-(acetylamino)-2-deoxy-b eta-D-galactopyranosyl]oxy]-1-oxopentyl]amino]propyl]amino] -3-oxopropoxy]methyl]-1,12,19,25-tetraoxo-16-oxa-13,20,24-t riazanonacos-1-yl]-4-hydroxy-2-pyrrolidinyl)methyl ester
atggtcagatcttcaaaataa

SEQ ID NO: 706 - RNA, 23 nt, synthetic construct
  source 1..23: mol_type = other RNA
  modified_base 1: mod_base = OTHER; note = 2'-O-methyluridine-3'-phosphorothioate
  modified_base 2: mod_base = OTHER; note = 2'-deoxy-2'-fluorouridine-3'-phosphorothioate
  modified_base 3: mod_base = OTHER; note = 2'-O-methyladenosine-3'-phosphate
  modified_base 4: mod_base = OTHER; note = 2'-O-methyluridine-3'-phosphate
  modified_base 5: mod_base = OTHER; note = 2'-O-methyluridine-3'-phosphate
  modified_base 6: mod_base = OTHER; note = 2'-O-methyluridine-3'-phosphate
  modified_base 7: mod_base = OTHER; note = 2'-O-methyluridine-3'-phosphate
  modified_base 8: mod_base = OTHER; note = Guanosine-glycol nucleic acid (GNA), S-isomer
  modified_base 9: mod_base = OTHER; note = 2'-O-methyladenosine-3'-phosphate
  modified_base 10: mod_base = OTHER; note = 2'-O-methyladenosine-3'-phosphate
  modified_base 11: mod_base = OTHER; note = 2'-O-methylguanosine-3'-phosphate
  modified_base 12: mod_base = OTHER; note = 2'-deoxy-2'-fluoroadenosine-3'-phosphate
  modified_base 13: mod_base = OTHER; note = 2'-O-methyluridine-3'-phosphate
  modified_base 14: mod_base = OTHER; note = 2'-deoxy-2'-fluorocytidine-3'-phosphate
  modified_base 15: mod_base = OTHER; note = 2'-O-methyluridine-3'-phosphate
  modified_base 16: mod_base = OTHER; note = 2'-deoxy-2'-fluoroguanosine-3'-phosphate
  modified_base 17: mod_base = OTHER; note = 2'-O-methyladenosine-3'-phosphate
  modified_base 18: mod_base = OTHER; note = 2'-O-methylcytidine-3'-phosphate
  modified_base 19: mod_base = OTHER; note = 2'-O-methylcytidine-3'-phosphate
  modified_base 20: mod_base = OTHER; note = 2'-O-methyladenosine-3'-phosphate
  modified_base 21: mod_base = OTHER; note = 2'-O-methyluridine-3'-phosphorothioate
  modified_base 22: mod_base = OTHER; note = 2'-O-methyluridine-3'-phosphorothioate
  modified_base 23: mod_base = OTHER; note = 2'-O-methylguanosine
ttattttgaagatctgaccattg

SEQ ID NO: 707 - RNA, 23 nt, synthetic construct
  source 1..23: mol_type = other RNA
  modified_base 4: mod_base = OTHER; note = 5'-methyluridine-3'-phosphate
  modified_base 7: mod_base = OTHER; note = 5'-methyluridine-3'-phosphate
  modified_base 12: mod_base = OTHER; note = 5'-methyluridine-3'-phosphate
  modified_base 14: mod_base = OTHER; note = 5'-methyluridine-3'-phosphate
  modified_base 15: mod_base = OTHER; note = 5'-methyluridine-3'-phosphate
  modified_base 21: mod_base = OTHER; note = 5'-methyluridine-3'-phosphate
caatggtcagatcttcaaaataa

SEQ ID NO: 708 - RNA, 21 nt, synthetic construct
  source 1..21: mol_type = other RNA
  modified_base 1: mod_base = OTHER; note = 2'-O-methyladenosine-3'-phosphorothioate
  modified_base 2: mod_base = OTHER; note = 2'-O-methyluridine-3'-phosphorothioate
  modified_base 3: mod_base = OTHER; note = 2'-O-methylguanosine-3'-phosphate
  modified_base 4: mod_base = OTHER; note = 2'-O-methylguanosine-3'-phosphate
  modified_base 5: mod_base = OTHER; note = 2'-O-hexadecyl-uridine-3'-phosphate
  modified_base 6: mod_base = OTHER; note = 2'-deoxy-2'-fluorocytidine-3'-phosphate
  modified_base 7: mod_base = OTHER; note = 2'-deoxy-2'-fluoroadenosine-3'-phosphate
  modified_base 8: mod_base = OTHER; note = 2'-O-methylguanosine-3'-phosphate
  modified_base 9: mod_base = OTHER; note = 2'-deoxy-2'-fluoroadenosine-3'-phosphate
  modified_base 10: mod_base = OTHER; note = 2'-O-methyluridine-3'-phosphate
  modified_base 11: mod_base = OTHER; note = 2'-deoxy-2'-fluorocytidine-3'-phosphate
  modified_base 12: mod_base = OTHER; note = 2'-deoxy-2'-fluorouridine-3'-phosphate
  modified_base 13: mod_base = OTHER; note = 2'-O-methyluridine-3'-phosphate
  modified_base 14: mod_base = OTHER; note = 2'-O-methylcytidine-3'-phosphate
  modified_base 15: mod_base = OTHER; note = 2'-O-methyladenosine-3'-phosphate
  modified_base 16: mod_base = OTHER; note = 2'-O-methyladenosine-3'-phosphate
  modified_base 17: mod_base = OTHER; note = 2'-O-methyladenosine-3'-phosphate
  modified_base 18: mod_base = OTHER; note = 2'-O-methyladenosine-3'-phosphate
  modified_base 19: mod_base = OTHER; note = 2'-deoxy-2'-fluorouridine-3'-phosphate
  modified_base 20: mod_base = OTHER; note = 2'-O-methyladenosine-3'-phosphate
  modified_base 21: mod_base = OTHER; note = 2'-deoxy-2'-fluoroadenosine-3'-phosphate ((2S,4R)-1-[29-[[2-(acetylamino)-2-deoxy-beta-D-galactopyra nosyl]oxy]-14,14-bis[[3-[[3-[[5-[[2-(acetylamino)-2-deoxy-b eta-D-galactopyranosyl]oxy]-1-oxopentyl]amino]propyl]amino] -3-oxopropoxy]methyl]-1,12,19,25-tetraoxo-16-oxa-13,20,24-t riazanonacos-1-yl]-4-hydroxy-2-pyrrolidinyl)methyl ester
atggtcagatcttcaaaataa

SEQ ID NO: 709 - RNA, 23 nt, synthetic construct
  source 1..23: mol_type = other RNA
  modified_base 1: mod_base = OTHER; note = 2'-O-methyluridine-3'-phosphorothioate
  modified_base 2: mod_base = OTHER; note = 2'-deoxy-2'-fluorouridine-3'-phosphorothioate
  modified_base 3: mod_base = OTHER; note = 2'-O-methyladenosine-3'-phosphate
  modified_base 4: mod_base = OTHER; note = 2'-O-methyluridine-3'-phosphate
  modified_base 5: mod_base = OTHER; note = 2'-deoxy-2'-fluorouridine-3'-phosphate
  modified_base 6: mod_base = OTHER; note = 2'-deoxy-2'-fluorouridine-3'-phosphate
  modified_base 7: mod_base = OTHER; note = 2'-O-methyluridine-3'-phosphate
  modified_base 8: mod_base = OTHER; note = 2'-deoxy-2'-fluoroguanosine-3'-phosphate
  modified_base 9: mod_base = OTHER; note = 2'-O-methyladenosine-3'-phosphate
  modified_base 10: mod_base = OTHER; note = 2'-O-methyladenosine-3'-phosphate
  modified_base 11: mod_base = OTHER; note = 2'-O-methylguanosine-3'-phosphate
  modified_base 12: mod_base = OTHER; note = 2'-deoxy-2'-fluoroadenosine-3'-phosphate
  modified_base 13: mod_base = OTHER; note = 2'-O-methyluridine-3'-phosphate
  modified_base 14: mod_base = OTHER; note = 2'-deoxy-2'-fluorocytidine-3'-phosphate
  modified_base 15: mod_base = OTHER; note = 2'-O-methyluridine-3'-phosphate
  modified_base 16: mod_base = OTHER; note = 2'-deoxy-2'-fluoroguanosine-3'-phosphate
  modified_base 17: mod_base = OTHER; note = 2'-O-methyladenosine-3'-phosphate
  modified_base 18: mod_base = OTHER; note = 2'-O-methylcytidine-3'-phosphate
  modified_base 19: mod_base = OTHER; note = 2'-O-methylcytidine-3'-phosphate
  modified_base 20: mod_base = OTHER; note = 2'-O-methyladenosine-3'-phosphate
  modified_base 21: mod_base = OTHER; note = 2'-O-methyluridine-3'-phosphorothioate
  modified_base 22: mod_base = OTHER; note = 2'-O-methyluridine-3'-phosphorothioate
  modified_base 23: mod_base = OTHER; note = 2'-O-methylguanosine
ttattttgaagatctgaccattg

SEQ ID NO: 710 - RNA, 23 nt, synthetic construct
  source 1..23: mol_type = other RNA
  modified_base 4: mod_base = OTHER; note = 5'-methyluridine-3'-phosphate
  modified_base 7: mod_base = OTHER; note = 5'-methyluridine-3'-phosphate
  modified_base 12: mod_base = OTHER; note = 5'-methyluridine-3'-phosphate
  modified_base 14: mod_base = OTHER; note = 5'-methyluridine-3'-phosphate
  modified_base 15: mod_base = OTHER; note = 5'-methyluridine-3'-phosphate
  modified_base 21: mod_base = OTHER; note = 5'-methyluridine-3'-phosphate
caatggtcagatcttcaaaataa

SEQ ID NO: 711 - RNA, 21 nt, synthetic construct
  source 1..21: mol_type = other RNA
  modified_base 1: mod_base = OTHER; note = 2'-O-methylcytidine-3'-phosphorothioate
  modified_base 2: mod_base = OTHER; note = 2'-O-methyladenosine-3'-phosphorothioate
  modified_base 3: mod_base = OTHER; note = 2'-O-methyluridine-3'-phosphate
  modified_base 4: mod_base = OTHER; note = 2'-O-methylguanosine-3'-phosphate
  modified_base 5: mod_base = OTHER; note = 2'-O-methyluridine-3'-phosphate
  modified_base 6: mod_base = OTHER; note = 2'-deoxy-2'-fluoroguanosine-3'-phosphate
  modified_base 7: mod_base = OTHER; note = 2'-deoxy-2'-fluorocytidine-3'-phosphate
  modified_base 8: mod_base = OTHER; note = 2'-O-methyladenosine-3'-phosphate
  modified_base 9: mod_base = OTHER; note = 2'-deoxy-2'-fluorocytidine-3'-phosphate
  modified_base 10: mod_base = OTHER; note = 2'-O-methyladenosine-3'-phosphate
  modified_base 11: mod_base = OTHER; note = 2'-deoxy-2'-fluorouridine-3'-phosphate
  modified_base 12: mod_base = OTHER; note = 2'-O-hexadecyl-uridine-3'-phosphate
  modified_base 13: mod_base = OTHER; note = 2'-O-methylguanosine-3'-phosphate
  modified_base 14: mod_base = OTHER; note = 2'-O-methyladenosine-3'-phosphate
  modified_base 15: mod_base = OTHER; note = 2'-O-methyladenosine-3'-phosphate
  modified_base 16: mod_base = OTHER; note = 2'-O-methyladenosine-3'-phosphate
  modified_base 17: mod_base = OTHER; note = 2'-O-methyladenosine-3'-phosphate
  modified_base 18: mod_base = OTHER; note = 2'-O-methylcytidine-3'-phosphate
  modified_base 19: mod_base = OTHER; note = 2'-deoxy-2'-fluorouridine-3'-phosphate
  modified_base 20: mod_base = OTHER; note = 2'-O-methylguanosine-3'-phosphate
  modified_base 21: mod_base = OTHER; note = 2'-deoxy-2'-fluorouridine-3'-phosphate ((2S,4R)-1-[29-[[2-(acetylamino)-2-deoxy-beta-D-galactopyra nosyl]oxy]-14,14-bis[[3-[[3-[[5-[[2-(acetylamino)-2-deoxy-b eta-D-galactopyranosyl]oxy]-1-oxopentyl]amino]propyl]amino] -3-oxopropoxy]methyl]-1,12,19,25-tetraoxo-16-oxa-13,20,24-t riazanonacos-1-yl]-4-hydroxy-2-pyrrolidinyl)methyl ester
catgtgcacattgaaaactgt

SEQ ID NO: 712 - RNA, 23 nt, synthetic construct
  source 1..23: mol_type = other RNA
  modified_base 1: mod_base = OTHER; note = 2'-O-methyladenosine-3'-phosphorothioate
  modified_base 2: mod_base = OTHER; note = 2'-deoxy-2'-fluorocytidine-3'-phosphorothioate
  modified_base 3: mod_base = OTHER; note = 2'-O-methyladenosine-3'-phosphate
  modified_base 4: mod_base = OTHER; note = 2'-O-methylguanosine-3'-phosphate
  modified_base 5: mod_base = OTHER; note = 2'-deoxy-2'-fluorouridine-3'-phosphate
  modified_base 6: mod_base = OTHER; note = 2'-deoxy-2'-fluorouridine-3'-phosphate
  modified_base 7: mod_base = OTHER; note = 2'-O-methyluridine-3'-phosphate
  modified_base 8: mod_base = OTHER; note = 2'-deoxy-2'-fluorouridine-3'-phosphate
  modified_base 9: mod_base = OTHER; note = 2'-O-methylcytidine-3'-phosphate
  modified_base 10: mod_base = OTHER; note = 2'-O-methyladenosine-3'-phosphate
  modified_base 11: mod_base = OTHER; note = 2'-O-methyladenosine-3'-phosphate
  modified_base 12: mod_base = OTHER; note = 2'-deoxy-2'-fluorouridine-3'-phosphate
  modified_base 13: mod_base = OTHER; note = 2'-O-methylguanosine-3'-phosphate
  modified_base 14: mod_base = OTHER; note = 2'-deoxy-2'-fluorouridine-3'-phosphate
  modified_base 15: mod_base = OTHER; note = 2'-O-methylguanosine-3'-phosphate
  modified_base 16: mod_base = OTHER; note = 2'-deoxy-2'-fluorocytidine-3'-phosphate
  modified_base 17: mod_base = OTHER; note = 2'-O-methyladenosine-3'-phosphate
  modified_base 18: mod_base = OTHER; note = 2'-O-methylcytidine-3'-phosphate
  modified_base 19: mod_base = OTHER; note = 2'-O-methyladenosine-3'-phosphate
  modified_base 20: mod_base = OTHER; note = 2'-O-methyluridine-3'-phosphate
  modified_base 21: mod_base = OTHER; note = 2'-O-methylguanosine-3'-phosphorothioate
  modified_base 22: mod_base = OTHER; note = 2'-O-methylcytidine-3'-phosphorothioate
  modified_base 23: mod_base = OTHER; note = 2'-O-methylguanosine
acagttttcaatgtgcacatgcg

SEQ ID NO: 713 - RNA, 23 nt, synthetic construct
  source 1..23: mol_type = other RNA
  modified_base 5: mod_base = OTHER; note = 5'-methyluridine-3'-phosphate
  modified_base 7: mod_base = OTHER; note = 5'-methyluridine-3'-phosphate
  modified_base 13: mod_base = OTHER; note = 5'-methyluridine-3'-phosphate
  modified_base 14: mod_base = OTHER; note = 5'-methyluridine-3'-phosphate
  modified_base 21: mod_base = OTHER; note = 5'-methyluridine-3'-phosphate
  modified_base 23: mod_base = OTHER; note = 5'-methyluridine
cgcatgtgcacattgaaaactgt

SEQ ID NO: 714 - RNA, 21 nt, synthetic construct
  source 1..21: mol_type = other RNA
  modified_base 1: mod_base = OTHER; note = 2'-O-methyladenosine-3'-phosphorothioate
  modified_base 2: mod_base = OTHER; note = 2'-O-methyluridine-3'-phosphorothioate
  modified_base 3: mod_base = OTHER; note = 2'-O-methyluridine-3'-phosphate
  modified_base 4: mod_base = OTHER; note = 2'-O-methylcytidine-3'-phosphate
  modified_base 5: mod_base = OTHER; note = 2'-O-methyladenosine-3'-phosphate
  modified_base 6: mod_base = OTHER; note = 2'-O-methyladenosine-3'-phosphate
  modified_base 7: mod_base = OTHER; note = 2'-deoxy-2'-fluoroadenosine-3'-phosphate
  modified_base 8: mod_base = OTHER; note = 2'-O-methylcytidine-3'-phosphate
  modified_base 9: mod_base = OTHER; note = 2'-deoxy-2'-fluorouridine-3'-phosphate
  modified_base 10: mod_base = OTHER; note = 2'-deoxy-2'-fluorouridine-3'-phosphate
  modified_base 11: mod_base = OTHER; note = 2'-deoxy-2'-fluoroguanosine-3'-phosphate
  modified_base 12: mod_base = OTHER; note = 2'-O-methyladenosine-3'-phosphate
  modified_base 13: mod_base = OTHER; note = 2'-O-methyladenosine-3'-phosphate
  modified_base 14: mod_base = OTHER; note = 2'-O-methyluridine-3'-phosphate
  modified_base 15: mod_base = OTHER; note = 2'-O-methyladenosine-3'-phosphate
  modified_base 16: mod_base = OTHER; note = 2'-O-methyluridine-3'-phosphate
  modified_base 17: mod_base = OTHER; note = 2'-O-methyluridine-3'-phosphate
  modified_base 18: mod_base = OTHER; note = 2'-O-methylcytidine-3'-phosphate
  modified_base 19: mod_base = OTHER; note = 2'-O-methyluridine-3'-phosphate
  modified_base 20: mod_base = OTHER; note = 2'-O-methyluridine-3'-phosphate
  modified_base 21: mod_base = OTHER; note = 2'-O-methyladenosine-3'-phosphate ((2S,4R)-1-[29-[[2-(acetylamino)-2-deoxy-beta-D-galactopyra nosyl]oxy]-14,14-bis[[3-[[3-[[5-[[2-(acetylamino)-2-deoxy-b eta-D-galactopyranosyl]oxy]-1-oxopentyl]amino]propyl]amino] -3-oxopropoxy]methyl]-1,12,19,25-tetraoxo-16-oxa-13,20,24-t riazanonacos-1-yl]-4-hydroxy-2-pyrrolidinyl)methyl ester
attcaaacttgaatattctta

SEQ ID NO: 715 - RNA, 23 nt, synthetic construct
  source 1..23: mol_type = other RNA
  modified_base 1: mod_base = OTHER; note = 2'-O-methyluridine-3'-phosphorothioate
  modified_base 2: mod_base = OTHER; note = 2'-deoxy-2'-fluoroadenosine-3'-phosphorothioate
  modified_base 3: mod_base = OTHER; note = 2'-O-methyladenosine-3'-phosphate
  modified_base 4: mod_base = OTHER; note = 2'-O-methylguanosine-3'-phosphate
  modified_base 5: mod_base = OTHER; note = 2'-O-methyladenosine-3'-phosphate
  modified_base 6: mod_base = OTHER; note = 2'-deoxy-2'-fluoroadenosine-3'-phosphate
  modified_base 7: mod_base = OTHER; note = 2'-O-methyluridine-3'-phosphate
  modified_base 8: mod_base = OTHER; note = 2'-deoxy-2'-fluoroadenosine-3'-phosphate
  modified_base 9: mod_base = OTHER; note = 2'-deoxy-2'-fluorouridine-3'-phosphate
  modified_base 10: mod_base = OTHER; note = 2'-O-methyluridine-3'-phosphate
  modified_base 11: mod_base = OTHER; note = 2'-O-methylcytidine-3'-phosphate
  modified_base 12: mod_base = OTHER; note = 2'-O-methyladenosine-3'-phosphate
  modified_base 13: mod_base = OTHER; note = 2'-O-methyladenosine-3'-phosphate
  modified_base 14: mod_base = OTHER; note = 2'-deoxy-2'-fluoroguanosine-3'-phosphate
  modified_base 15: mod_base = OTHER; note = 2'-O-methyluridine-3'-phosphate
  modified_base 16: mod_base = OTHER; note = 2'-deoxy-2'-fluorouridine-3'-phosphate
  modified_base 17: mod_base = OTHER; note = 2'-O-methyluridine-3'-phosphate
  modified_base 18: mod_base = OTHER; note = 2'-O-methylguanosine-3'-phosphate
  modified_base 19: mod_base = OTHER; note = 2'-O-methyladenosine-3'-phosphate
  modified_base 20: mod_base = OTHER; note = 2'-O-methyladenosine-3'-phosphate
  modified_base 21: mod_base = OTHER; note = 2'-O-methyluridine-3'-phosphorothioate
  modified_base 22: mod_base = OTHER; note = 2'-O-methylguanosine-3'-phosphorothioate
  modified_base 23: mod_base = OTHER; note = 2'-O-methyladenosine
taagaatattcaagtttgaatga

SEQ ID NO: 716 - RNA, 23 nt, synthetic construct
  source 1..23: mol_type = other RNA
  modified_base 1: mod_base = OTHER; note = 5'-methyluridine-3'-phosphate
  modified_base 4: mod_base = OTHER; note = 5'-methyluridine-3'-phosphate
  modified_base 5: mod_base = OTHER; note = 5'-methyluridine-3'-phosphate
  modified_base 11: mod_base = OTHER; note = 5'-methyluridine-3'-phosphate
  modified_base 12: mod_base = OTHER; note = 5'-methyluridine-3'-phosphate
  modified_base 16: mod_base = OTHER; note = 5'-methyluridine-3'-phosphate
  modified_base 18: mod_base = OTHER; note = 5'-methyluridine-3'-phosphate
  modified_base 19: mod_base = OTHER; note = 5'-methyluridine-3'-phosphate
  modified_base 21: mod_base = OTHER; note = 5'-methyluridine-3'-phosphate
  modified_base 22: mod_base = OTHER; note = 5'-methyluridine-3'-phosphate
tcattcaaacttgaatattctta

SEQ ID NO: 717 - RNA, 21 nt, synthetic construct
  source 1..21: mol_type = other RNA
  modified_base 1: mod_base = OTHER; note = 2'-O-methylcytidine-3'-phosphorothioate
  modified_base 2: mod_base = OTHER; note = 2'-O-methyladenosine-3'-phosphorothioate
  modified_base 3: mod_base = OTHER; note = 2'-O-methyluridine-3'-phosphate
  modified_base 4: mod_base = OTHER; note = 2'-O-methylguanosine-3'-phosphate
  modified_base 5: mod_base = OTHER; note = 2'-O-hexadecyl-uridine-3'-phosphate
  modified_base 6: mod_base = OTHER; note = 2'-deoxy-2'-fluoroguanosine-3'-phosphate
  modified_base 7: mod_base = OTHER; note = 2'-deoxy-2'-fluorocytidine-3'-phosphate
  modified_base 8: mod_base = OTHER; note = 2'-O-methyladenosine-3'-phosphate
  modified_base 9: mod_base = OTHER; note = 2'-deoxy-2'-fluorocytidine-3'-phosphate
  modified_base 10: mod_base = OTHER; note = 2'-O-methyladenosine-3'-phosphate
  modified_base 11: mod_base = OTHER; note = 2'-deoxy-2'-fluorouridine-3'-phosphate
  modified_base 12: mod_base = OTHER; note = 2'-deoxy-2'-fluorouridine-3'-phosphate
  modified_base 13: mod_base = OTHER; note = 2'-O-methylguanosine-3'-phosphate
  modified_base 14: mod_base = OTHER; note = 2'-O-methyladenosine-3'-phosphate
  modified_base 15: mod_base = OTHER; note = 2'-O-methyladenosine-3'-phosphate
  modified_base 16: mod_base = OTHER; note = 2'-O-methyladenosine-3'-phosphate
  modified_base 17: mod_base = OTHER; note = 2'-O-methyladenosine-3'-phosphate
  modified_base 18: mod_base = OTHER; note = 2'-O-methylcytidine-3'-phosphate
  modified_base 19: mod_base = OTHER; note = 2'-deoxy-2'-fluorouridine-3'-phosphate
  modified_base 20: mod_base = OTHER; note = 2'-O-methylguanosine-3'-phosphate
  modified_base 21: mod_base = OTHER; note = 2'-deoxy-2'-fluorouridine-3'-phosphate ((2S,4R)-1-[29-[[2-(acetylamino)-2-deoxy-beta-D-galactopyra nosyl]oxy]-14,14-bis[[3-[[3-[[5-[[2-(acetylamino)-2-deoxy-b eta-D-galactopyranosyl]oxy]-1-oxopentyl]amino]propyl]amino] -3-oxopropoxy]methyl]-1,12,19,25-tetraoxo-16-oxa-13,20,24-t riazanonacos-1-yl]-4-hydroxy-2-pyrrolidinyl)methyl ester
catgtgcacattgaaaactgt

SEQ ID NO: 718 - RNA, 23 nt, synthetic construct
  source 1..23: mol_type = other RNA
  modified_base 1: mod_base = OTHER; note = 2'-O-methyladenosine-3'-phosphorothioate
  modified_base 2: mod_base = OTHER; note = 2'-deoxy-2'-fluorocytidine-3'-phosphorothioate
  modified_base 3: mod_base = OTHER; note = 2'-O-methyladenosine-3'-phosphate
  modified_base 4: mod_base = OTHER; note = 2'-O-methylguanosine-3'-phosphate
  modified_base 5: mod_base = OTHER; note = 2'-deoxy-2'-fluorouridine-3'-phosphate
  modified_base 6: mod_base = OTHER; note = 2'-deoxy-2'-fluorouridine-3'-phosphate
  modified_base 7: mod_base = OTHER; note = 2'-O-methyluridine-3'-phosphate
  modified_base 8: mod_base = OTHER; note = 2'-deoxy-2'-fluorouridine-3'-phosphate
  modified_base 9: mod_base = OTHER; note = 2'-O-methylcytidine-3'-phosphate
  modified_base 10: mod_base = OTHER; note = 2'-O-methyladenosine-3'-phosphate
  modified_base 11: mod_base = OTHER; note = 2'-O-methyladenosine-3'-phosphate
  modified_base 12: mod_base = OTHER; note = 2'-deoxy-2'-fluorouridine-3'-phosphate
  modified_base 13: mod_base = OTHER; note = 2'-O-methylguanosine-3'-phosphate
  modified_base 14: mod_base = OTHER; note = 2'-deoxy-2'-fluorouridine-3'-phosphate
  modified_base 15: mod_base = OTHER; note = 2'-O-methylguanosine-3'-phosphate
  modified_base 16: mod_base = OTHER; note = 2'-deoxy-2'-fluorocytidine-3'-phosphate
  modified_base 17: mod_base = OTHER; note = 2'-O-methyladenosine-3'-phosphate
  modified_base 18: mod_base = OTHER; note = 2'-O-methylcytidine-3'-phosphate
  modified_base 19: mod_base = OTHER; note = 2'-O-methyladenosine-3'-phosphate
  modified_base 20: mod_base = OTHER; note = 2'-O-methyluridine-3'-phosphate
  modified_base 21: mod_base = OTHER; note = 2'-O-methylguanosine-3'-phosphorothioate
  modified_base 22: mod_base = OTHER; note = 2'-O-methylcytidine-3'-phosphorothioate
  modified_base 23: mod_base = OTHER; note = 2'-O-methylguanosine
acagttttcaatgtgcacatgcg

SEQ ID NO: 719 - RNA, 23 nt, synthetic construct
  source 1..23: mol_type = other RNA
  modified_base 5: mod_base = OTHER; note = 5'-methyluridine-3'-phosphate
  modified_base 7: mod_base = OTHER; note = 5'-methyluridine-3'-phosphate
  modified_base 13: mod_base = OTHER; note = 5'-methyluridine-3'-phosphate
  modified_base 14: mod_base = OTHER; note = 5'-methyluridine-3'-phosphate
  modified_base 21: mod_base = OTHER; note = 5'-methyluridine-3'-phosphate
  modified_base 23: mod_base = OTHER; note = 5'-methyluridine
cgcatgtgcacattgaaaactgt

SEQ ID NO: 720 - RNA, 21 nt, synthetic construct
  source 1..21: mol_type = other RNA
atggtcagatcttcaaaataa

SEQ ID NO: 721 - RNA, 23 nt, synthetic construct
  source 1..23: mol_type = other RNA
ttattttgaagatctgaccattg

SEQ ID NO: 722 - RNA, 21 nt, synthetic construct
  source 1..21: mol_type = other RNA
ttgtgtcaaaatgttctacat

SEQ ID NO: 723 - RNA, 23 nt, synthetic construct
  source 1..23: mol_type = other RNA
atgtagaacattttgacacaaaa

SEQ ID NO: 724 - RNA, 21 nt, synthetic construct
  source 1..21: mol_type = other RNA
atggtcagatcttcaaaataa

SEQ ID NO: 725 - RNA, 23 nt, synthetic construct
  source 1..23: mol_type = other RNA
ttattttgaagatctgaccattg

SEQ ID NO: 726 - RNA, 21 nt, synthetic construct
  source 1..21: mol_type = other RNA
ttgtgtcaaaatgttctacat

SEQ ID NO: 727 - RNA, 23 nt, synthetic construct
  source 1..23: mol_type = other RNA
atgtagaacattttgacacaaaa

SEQ ID NO: 728 - RNA, 21 nt, synthetic construct
  source 1..21: mol_type = other RNA
atggtcagatcttcaaaataa

SEQ ID NO: 729 - RNA, 23 nt, synthetic construct
  source 1..23: mol_type = other RNA
ttattttgaagatctgaccattg

SEQ ID NO: 730 - RNA, 21 nt, synthetic construct
  source 1..21: mol_type = other RNA
catgtgcacattgaaaactgt

SEQ ID NO: 731 - RNA, 23 nt, synthetic construct
  source 1..23: mol_type = other RNA
acagttttcaatgtgcacatgcg

SEQ ID NO: 732 - RNA, 21 nt, synthetic construct
  source 1..21: mol_type = other RNA
aaccagatgttttccaccaaa

SEQ ID NO: 733 - RNA, 23 nt, synthetic construct
  source 1..23: mol_type = other RNA
tttggtggaaaacatctggtttt

SEQ ID NO: 734 - RNA, 21 nt, synthetic construct
  source 1..21: mol_type = other RNA
atggtcagatcttcaaaataa

SEQ ID NO: 735 - RNA, 23 nt, synthetic construct
  source 1..23: mol_type = other RNA
ttattttgaagatctgaccattg

SEQ ID NO: 736 - RNA, 21 nt, synthetic construct
  source 1..21: mol_type = other RNA
aatggtcagatcttcaaaata

SEQ ID NO: 737 - RNA, 23 nt, synthetic construct
  source 1..23: mol_type = other RNA
tattttgaagatctgaccattgg

SEQ ID NO: 738 - RNA, 21 nt, synthetic construct
  source 1..21: mol_type = other RNA
atggtcagatcttcaaaataa

SEQ ID NO: 739 - RNA, 23 nt, synthetic construct
  source 1..23: mol_type = other RNA
ttattttgaagatctgaccattg

SEQ ID NO: 740 - RNA, 21 nt, synthetic construct
  source 1..21: mol_type = other RNA
ttgtgtcaaaatgttctacat

SEQ ID NO: 741 - RNA, 23 nt, synthetic construct
  source 1..23: mol_type = other RNA
atgtagaacattttgacacaaaa

SEQ ID NO: 742 - RNA, 21 nt, synthetic construct
  source 1..21: mol_type = other RNA
ttgtgtcaaaatgttctacat

SEQ ID NO: 743 - RNA, 23 nt, synthetic construct
  source 1..23: mol_type = other RNA
atgtagaacattttgacacaaaa

SEQ ID NO: 744 - RNA, 21 nt, synthetic construct
  source 1..21: mol_type = other RNA
gctaggaagtattcattcaaa

SEQ ID NO: 745 - RNA, 23 nt, synthetic construct
  source 1..23: mol_type = other RNA
tttgaatgaatacttcctagcta

SEQ ID NO: 746 - RNA, 21 nt, synthetic construct
  source 1..21: mol_type = other RNA
ttgtgtcaaaatgttctacat

SEQ ID NO: 747 - RNA, 23 nt, synthetic construct
  source 1..23: mol_type = other RNA
atgtagaacattttgacacaaaa

SEQ ID NO: 748 - RNA, 21 nt, synthetic construct
  source 1..21: mol_type = other RNA
catgtgcacattgaaaactgt

SEQ ID NO: 749 - RNA, 23 nt, synthetic construct
  source 1..23: mol_type = other RNA
acagttttcaatgtgcacatgcg

SEQ ID NO: 750 - RNA, 21 nt, synthetic construct
  source 1..21: mol_type = other RNA
ttgtgtcaaaatgttctacat

SEQ ID NO: 751 - RNA, 23 nt, synthetic construct
  source 1..23: mol_type = other RNA
atgtagaacattttgacacaaaa

SEQ ID NO: 752 - RNA, 21 nt, synthetic construct
  source 1..21: mol_type = other RNA
tggtcagatcttcaaaataaa

SEQ ID NO: 753 - RNA, 23 nt, synthetic construct
  source 1..23: mol_type = other RNA
tttattttgaagatctgaccatt

SEQ ID NO: 754 - RNA, 21 nt, synthetic construct
  source 1..21: mol_type = other RNA
ttgtgtcaaaatgttctacat

SEQ ID NO: 755 - RNA, 23 nt, synthetic construct
  source 1..23: mol_type = other RNA
atgtagaacattttgacacaaaa

SEQ ID NO: 756 - RNA, 21 nt, synthetic construct
  source 1..21: mol_type = other RNA
ttgtgtcaaaatgttctacat

SEQ ID NO: 757 - RNA, 23 nt, synthetic construct
  source 1..23: mol_type = other RNA
atgtagaacattttgacacaaaa

SEQ ID NO: 758 - RNA, 21 nt, synthetic construct
  source 1..21: mol_type = other RNA
caatggtcagatcttcaaaat

SEQ ID NO: 759 - RNA, 23 nt, synthetic construct
  source 1..23: mol_type = other RNA
attttgaagatctgaccattggc

SEQ ID NO: 760 - RNA, 21 nt, synthetic construct
  source 1..21: mol_type = other RNA
ttgtgtcaaaatgttctacat

SEQ ID NO: 761 - RNA, 23 nt, synthetic construct
  source 1..23: mol_type = other RNA
atgtagaacattttgacacaaaa

SEQ ID NO: 762 - RNA, 21 nt, synthetic construct
  source 1..21: mol_type = other RNA
atggtcagatcttcaaaataa

SEQ ID NO: 763 - RNA, 23 nt, synthetic construct
  source 1..23: mol_type = other RNA
ttattttgaagatctgaccattg

SEQ ID NO: 764 - RNA, 21 nt, synthetic construct
  source 1..21: mol_type = other RNA
atggtcagatcttcaaaataa

SEQ ID NO: 765 - RNA, 23 nt, synthetic construct
  source 1..23: mol_type = other RNA
ttattttgaagatctgaccattg

SEQ ID NO: 766 - RNA, 21 nt, synthetic construct
  source 1..21: mol_type = other RNA
ggtcagatcttcaaaataaaa

SEQ ID NO: 767 - RNA, 23 nt, synthetic construct
  source 1..23: mol_type = other RNA
ttttattttgaagatctgaccat

SEQ ID NO: 768 - RNA, 21 nt, synthetic construct
  source 1..21: mol_type = other RNA
ttgtgtcaaaatgttctacat

SEQ ID NO: 769 - RNA, 23 nt, synthetic construct
  source 1..23: mol_type = other RNA
atgtagaacattttgacacaaaa

SEQ ID NO: 770 - RNA, 21 nt, synthetic construct
  source 1..21: mol_type = other RNA
atggtcagatcttcaaaataa

SEQ ID NO: 771 - RNA, 23 nt, synthetic construct
  source 1..23: mol_type = other RNA
ttattttgaagatctgaccattg

SEQ ID NO: 772 - RNA, 21 nt, synthetic construct
  source 1..21: mol_type = other RNA
atggtcagatcttcaaaataa

SEQ ID NO: 773 - RNA, 23 nt, synthetic construct
  source 1..23: mol_type = other RNA
ttattttgaagatctgaccattg

SEQ ID NO: 774 - RNA, 21 nt, synthetic construct
  source 1..21: mol_type = other RNA
ttgtgtcaaaatgttctacat

SEQ ID NO: 775 - RNA, 23 nt, synthetic construct
  source 1..23: mol_type = other RNA
atgtagaacattttgacacaaaa

SEQ ID NO: 776 - RNA, 20 nt, synthetic construct
  source 1..20: mol_type = other RNA
ttgtgtcaaaatgttctaca

SEQ ID NO: 777 - RNA, 23 nt, synthetic construct
  source 1..23: mol_type = other RNA
atgtagaacattttgacacaaaa

SEQ ID NO: 778 - RNA, 21 nt, synthetic construct
  source 1..21: mol_type = other RNA
ttgtgtcaaaatgttctacat

SEQ ID NO: 779 - RNA, 23 nt, synthetic construct
  source 1..23: mol_type = other RNA
atgtagaacattttgacacaaaa

SEQ ID NO: 780 - RNA, 21 nt, synthetic construct
  source 1..21: mol_type = other RNA
atggtcagatcttcaaaataa

SEQ ID NO: 781 - RNA, 23 nt, synthetic construct
  source 1..23: mol_type = other RNA
ttattttgaagatctgaccattg

SEQ ID NO: 782 - RNA, 21 nt, synthetic construct
  source 1..21: mol_type = other RNA
catgtgcacattgaaaactgt

SEQ ID NO: 783 - RNA, 23 nt, synthetic construct
  source 1..23: mol_type = other RNA
acagttttcaatgtgcacatgcg

SEQ ID NO: 784 - RNA, 21 nt, synthetic construct
  source 1..21: mol_type = other RNA
ttgtgtcaaaatgttctacat

SEQ ID NO: 785 - RNA, 23 nt, synthetic construct
  source 1..23: mol_type = other RNA
atgtagaacattttgacacaaaa

SEQ ID NO: 786 - RNA, 21 nt, synthetic construct
  source 1..21: mol_type = other RNA
tcaaacttgaatattcttcaa

SEQ ID NO: 787 - RNA, 23 nt, synthetic construct
  source 1..23: mol_type = other RNA
ttgaagaatattcaagtttgaat

SEQ ID NO: 788 - RNA, 21 nt, synthetic construct
  source 1..21: mol_type = other RNA
ttgtgtcaaaatgttctacat

SEQ ID NO: 789 - RNA, 23 nt, synthetic construct
  source 1..23: mol_type = other RNA
atgtagaacattttgacacaaaa

SEQ ID NO: 790 - RNA, 21 nt, synthetic construct
  source 1..21: mol_type = other RNA
catgtgcacattgaaaactgt

SEQ ID NO: 791 - RNA, 23 nt, synthetic construct
  source 1..23: mol_type = other RNA
acagttttcaatgtgcacatgcg

SEQ ID NO: 792 - RNA, 21 nt, synthetic construct
  source 1..21: mol_type = other RNA
catgtgcacattgaaaactgt

SEQ ID NO: 793 - RNA, 23 nt, synthetic construct
  source 1..23: mol_type = other RNA
acagttttcaatgtgcacatgcg

SEQ ID NO: 794 - RNA, 21 nt, synthetic construct
  source 1..21: mol_type = other RNA
ttcattcaaacttgaatatta

SEQ ID NO: 795 - RNA, 23 nt, synthetic construct
  source 1..23: mol_type = other RNA
taatattcaagtttgaatgaata

SEQ ID NO: 796 - RNA, 21 nt, synthetic construct
  source 1..21: mol_type = other RNA
catgtgcacattgaaaactgt

SEQ ID NO: 797 - RNA, 23 nt, synthetic construct
  source 1..23: mol_type = other RNA
acagttttcaatgtgcacatgcg

SEQ ID NO: 798 - RNA, 21 nt, synthetic construct
  source 1..21: mol_type = other RNA
ttgtgtcaaaatgttctacat

SEQ ID NO: 799 - RNA, 23 nt, synthetic construct
  source 1..23: mol_type = other RNA
atgtagaacattttgacacaaaa

SEQ ID NO: 800 - RNA, 21 nt, synthetic construct
  source 1..21: mol_type = other RNA
ttgtgtcaaaatgttctacat

SEQ ID NO: 801 - RNA, 23 nt, synthetic construct
  source 1..23: mol_type = other RNA
atgtagaacattttgacacaaaa

SEQ ID NO: 802 - RNA, 21 nt, synthetic construct
  source 1..21: mol_type = other RNA
catgtgcacattgaaaactgt

SEQ ID NO: 803 - RNA, 23 nt, synthetic construct
  source 1..23: mol_type = other RNA
acagttttcaatgtgcacatgcg

SEQ ID NO: 804 - RNA, 21 nt, synthetic construct
  source 1..21: mol_type = other RNA
tgtgtcaaaatgttctacatt

SEQ ID NO: 805 - RNA, 23 nt, synthetic construct
  source 1..23: mol_type = other RNA
aatgtagaacattttgacacaaa

SEQ ID NO: 806 - RNA, 21 nt, synthetic construct
  source 1..21: mol_type = other RNA
catgtgcacattgaaaactgt

SEQ ID NO: 807 - RNA, 23 nt, synthetic construct
  source 1..23: mol_type = other RNA
acagttttcaatgtgcacatgcg

SEQ ID NO: 808 - RNA, 21 nt, synthetic construct
  source 1..21: mol_type = other RNA
catgtgcacattgaaaactgt

SEQ ID NO: 809 - RNA, 23 nt, synthetic construct
  source 1..23: mol_type = other RNA
acagttttcaatgtgcacatgcg

SEQ ID NO: 810 - RNA, 20 nt, synthetic construct
  source 1..20: mol_type = other RNA
atggtcagatcttcaaaata

SEQ ID NO: 811 - RNA, 23 nt, synthetic construct
  source 1..23: mol_type = other RNA
ttattttgaagatctgaccattg

SEQ ID NO: 812 - RNA, 21 nt, synthetic construct
  source 1..21: mol_type = other RNA
atggtcagatcttcaaaataa

SEQ ID NO: 813 - RNA, 23 nt, synthetic construct
  source 1..23: mol_type = other RNA
ttattttgaagatctgaccattg

SEQ ID NO: 814 - RNA, 21 nt, synthetic construct
  source 1..21: mol_type = other RNA
ttgtgtcaaaatgttctacat

SEQ ID NO: 815 - RNA, 23 nt, synthetic construct
  source 1..23: mol_type = other RNA
atgtagaacattttgacacaaaa

SEQ ID NO: 816 - RNA, 21 nt, synthetic construct
  source 1..21: mol_type = other RNA
ttgtgtcaaaatgttctacat

SEQ ID NO: 817 - RNA, 23 nt, synthetic construct
  source 1..23: mol_type = other RNA
atgtagaacattttgacacaaaa

SEQ ID NO: 818 - RNA, 21 nt, synthetic construct
  source 1..21: mol_type = other RNA
agctaggaagtattcattcaa

SEQ ID NO: 819 - RNA, 23 nt, synthetic construct
  source 1..23: mol_type = other RNA
ttgaatgaatacttcctagctat

SEQ ID NO: 820 - RNA, 21 nt, synthetic construct
  source 1..21: mol_type = other RNA
catgtgcacattgaaaactgt

SEQ ID NO: 821 - RNA, 23 nt, synthetic construct
  source 1..23: mol_type = other RNA
acagttttcaatgtgcacatgcg

SEQ ID NO: 822 - RNA, 21 nt, synthetic construct
  source 1..21: mol_type = other RNA
catgtgcacattgaaaactgt

SEQ ID NO: 823 - RNA, 23 nt, synthetic construct
  source 1..23: mol_type = other RNA
acagttttcaatgtgcacatgcg

SEQ ID NO: 824 - RNA, 21 nt, synthetic construct
  source 1..21: mol_type = other RNA
ctaggaagtattcattcaaaa

SEQ ID NO: 825 - RNA, 23 nt, synthetic construct
  source 1..23: mol_type = other RNA
ttttgaatgaatacttcctagct

SEQ ID NO: 826 - RNA, 21 nt, synthetic construct
  source 1..21: mol_type = other RNA
ttcaaacttgaatattcttca

SEQ ID NO: 827 - RNA, 23 nt, synthetic construct
  source 1..23: mol_type = other RNA
tgaagaatattcaagtttgaatg

SEQ ID NO: 828 - RNA, 21 nt, synthetic construct
  source 1..21: mol_type = other RNA
atggtcagatcttcaaaataa

SEQ ID NO: 829 - RNA, 23 nt, synthetic construct
  source 1..23: mol_type = other RNA
ttattttgaagatctgaccattg

SEQ ID NO: 830 - RNA, 21 nt, synthetic construct
  source 1..21: mol_type = other RNA
catgtgcacattgaaaactgt

SEQ ID NO: 831 - RNA, 23 nt, synthetic construct
  source 1..23: mol_type = other RNA
acagttttcaatgtgcacatgcg

SEQ ID NO: 832 - RNA, 21 nt, synthetic construct
  source 1..21: mol_type = other RNA
atggtcagatcttcaaaataa

SEQ ID NO: 833 - RNA, 23 nt, synthetic construct
  source 1..23: mol_type = other RNA
  modified_base 6: mod_base = OTHER; note = 5'-methyluridine-3'-phosphate
ttattttgaagatctgaccattg

SEQ ID NO: 834 - RNA, 21 nt, synthetic construct
  source 1..21: mol_type = other RNA
atggtcagatcttcaaaataa

SEQ ID NO: 835 - RNA, 23 nt, synthetic construct
  source 1..23: mol_type = other RNA
ttattttgaagatctgaccattg

SEQ ID NO: 836 - RNA, 21 nt, synthetic construct
  source 1..21: mol_type = other RNA
aatagctaggaagtattcatt

SEQ ID NO: 837 - RNA, 23 nt, synthetic construct
  source 1..23: mol_type = other RNA
aatgaatacttcctagctattta

SEQ ID NO: 838 - RNA, 21 nt, synthetic construct
  source 1..21: mol_type = other RNA
agtattcattcaaacttgaat

SEQ ID NO: 839 - RNA, 23 nt, synthetic construct
  source 1..23: mol_type = other RNA
attcaagtttgaatgaatacttc

SEQ ID NO: 840 - RNA, 21 nt, synthetic construct
  source 1..21: mol_type = other RNA
aggaagtattcattcaaactt

SEQ ID NO: 841 - RNA, 23 nt, synthetic construct
  source 1..23: mol_type = other RNA
aagtttgaatgaatacttcctag

SEQ ID NO: 842 - RNA, 20 nt, synthetic construct
  source 1..20: mol_type = other RNA
catgtgcacattgaaaactg

SEQ ID NO: 843 - RNA, 23 nt, synthetic construct
  source 1..23: mol_type = other RNA
acagttttcaatgtgcacatgcg

SEQ ID NO: 844 - RNA, 21 nt, synthetic construct
  source 1..21: mol_type = other RNA
catgtgcacattgaaaactgt

SEQ ID NO: 845 - RNA, 23 nt, synthetic construct
  source 1..23: mol_type = other RNA
  modified_base 7: mod_base = OTHER; note = 5'-methyluridine-3'-phosphate
acagttttcaatgtgcacatgcg

SEQ ID NO: 846 - RNA, 21 nt, synthetic construct
  source 1..21: mol_type = other RNA
ggctaaatagctaggaagtat

SEQ ID NO: 847 - RNA, 23 nt, synthetic construct
  source 1..23: mol_type = other RNA
atacttcctagctatttagcctt

SEQ ID NO: 848 - RNA, 21 nt, synthetic construct
  source 1..21: mol_type = other RNA
aagtattcattcaaacttgaa

SEQ ID NO: 849 - RNA, 23 nt, synthetic construct
  source 1..23: mol_type = other RNA
ttcaagtttgaatgaatacttcc

SEQ ID NO: 850 - RNA, 21 nt, synthetic construct
  source 1..21: mol_type = other RNA
aattctaaggctaaatagcta

SEQ ID NO: 851 - RNA, 23 nt, synthetic construct
  source 1..23: mol_type = other RNA
tagctatttagccttagaattct

SEQ ID NO: 852 - RNA, 21 nt, synthetic construct
  source 1..21: mol_type = other RNA
ttgaatattcttcaaagagaa

SEQ ID NO: 853 - RNA, 23 nt, synthetic construct
  source 1..23: mol_type = other RNA
ttctctttgaagaatattcaagt

SEQ ID NO: 854 - RNA, 21 nt, synthetic construct
  source 1..21: mol_type = other RNA
tagctaggaagtattcattca

SEQ ID NO: 855 - RNA, 23 nt, synthetic construct
  source 1..23: mol_type = other RNA
tgaatgaatacttcctagctatt

SEQ ID NO: 856 - RNA, 21 nt, synthetic construct
  source 1..21: mol_type = other RNA
aacttgaatattcttcaaaga

SEQ ID NO: 857 - RNA, 23 nt, synthetic construct
  source 1..23: mol_type = other RNA
tctttgaagaatattcaagtttg

SEQ ID NO: 858 - RNA, 21 nt, synthetic construct
  source 1..21: mol_type = other RNA
gaattctaaggctaaatagct

SEQ ID NO: 859 - RNA, 23 nt, synthetic construct
  source 1..23: mol_type = other RNA
agctatttagccttagaattctg

SEQ ID NO: 860 - RNA, 21 nt, synthetic construct
  source 1..21: mol_type = other RNA
atggtcagatcttcaaaataa

SEQ ID NO: 861 - RNA, 23 nt, synthetic construct
  source 1..23: mol_type = other RNA
  modified_base 7: mod_base = OTHER; note = 5'-methyluridine-3'-phosphate
ttattttgaagatctgaccattg

SEQ ID NO: 862 - RNA, 21 nt, synthetic construct
  source 1..21: mol_type = other RNA
atagctaggaagtattcatta

SEQ ID NO: 863 - RNA, 23 nt, synthetic construct
  source 1..23: mol_type = other RNA
taatgaatacttcctagctattt

SEQ ID NO: 864 - RNA, 21 nt, synthetic construct
  source 1..21: mol_type = other RNA
catgtgcacattgaaaactgt

SEQ ID NO: 865 - RNA, 23 nt, synthetic construct
  source 1..23: mol_type = other RNA
  modified_base 6: mod_base = OTHER; note = 5'-methyluridine-3'-phosphate
acagttttcaatgtgcacatgcg

SEQ ID NO: 866 - RNA, 21 nt, synthetic construct
  source 1..21: mol_type = other RNA
catgtgcacattgaaaactgt

SEQ ID NO: 867 - RNA, 23 nt, synthetic construct
  source 1..23: mol_type = other RNA
  modified_base 8: mod_base = OTHER; note = 5'-methyluridine-3'-phosphate
acagttttcaatgtgcacatgcg

SEQ ID NO: 868 - RNA, 21 nt, synthetic construct
  source 1..21: mol_type = other RNA
catgtgcacattgaaaactgt

SEQ ID NO: 869 - RNA, 23 nt, synthetic construct
  source 1..23: mol_type = other RNA
  modified_base 7: mod_base = OTHER; note = 5'-methyluridine-3'-phosphate
acagttttcaatgtgcacatgcg

SEQ ID NO: 870 - RNA, 21 nt, synthetic construct
  source 1..21: mol_type = other RNA
attcattcaaacttgaatatt

SEQ ID NO: 871 - RNA, 23 nt, synthetic construct
  source 1..23: mol_type = other RNA
aatattcaagtttgaatgaatac

SEQ ID NO: 872 - RNA, 21 nt, synthetic construct
  source 1..21: mol_type = other RNA
acttgaatattcttcaaagaa

SEQ ID NO: 873 - RNA, 23 nt, synthetic construct
  source 1..23: mol_type = other RNA
ttctttgaagaatattcaagttt

SEQ ID NO: 874 - RNA, 21 nt, synthetic construct
  source 1..21: mol_type = other RNA
atggtcagatcttcaaaataa

SEQ ID NO: 875 - RNA, 23 nt, synthetic construct
  source 1..23: mol_type = other RNA
  modified_base 7: mod_base = OTHER; note = 5'-methyluridine-3'-phosphate
ttattttgaagatctgaccattg

SEQ ID NO: 876 - RNA, 21 nt, synthetic construct
  source 1..21: mol_type = other RNA
atgtgcacattgaaaactgta

SEQ ID NO: 877 - RNA, 23 nt, synthetic construct
  source 1..23: mol_type = other RNA
tacagttttcaatgtgcacatgc

SEQ ID NO: 878 - RNA, 21 nt, synthetic construct
  source 1..21: mol_type = other RNA
atggtcagatcttcaaaataa

SEQ ID NO: 879 - RNA, 23 nt, synthetic construct
  source 1..23: mol_type = other RNA
ttattttgaagatctgaccattg

SEQ ID NO: 880 - RNA, 21 nt, synthetic construct
  source 1..21: mol_type = other RNA
atggtcagatcttcaaaataa

SEQ ID NO: 881 - RNA, 23 nt, synthetic construct
  source 1..23: mol_type = other RNA
ttattttgaagatctgaccattg

SEQ ID NO: 882 - RNA, 21 nt, synthetic construct
  source 1..21: mol_type = other RNA
catgtgcacattgaaaactgt

SEQ ID NO: 883 - RNA, 23 nt, synthetic construct
  source 1..23: mol_type = other RNA
acagttttcaatgtgcacatgcg

SEQ ID NO: 884 - RNA, 21 nt, synthetic construct
  source 1..21: mol_type = other RNA
attcaaacttgaatattctta

SEQ ID NO: 885 - RNA, 23 nt, synthetic construct
  source 1..23: mol_type = other RNA
taagaatattcaagtttgaatga

SEQ ID NO: 886 - RNA, 21 nt, synthetic construct
  source 1..21: mol_type = other RNA
catgtgcacattgaaaactgt

SEQ ID NO: 887 - RNA, 23 nt, synthetic construct
  source 1..23: mol_type = other RNA
acagttttcaatgtgcacatgcg

SEQ ID NO: 888 - skipped

SEQ ID NO: 889 - RNA, 21 nt, synthetic construct
  source 1..21: mol_type = other RNA
  modified_base 1: mod_base = OTHER; note = 2'-O-methylcytidine-3'-phosphorothioate
  modified_base 2: mod_base = OTHER; note = 2'-O-methylcytidine-3'-phosphorothioate
  modified_base 3: mod_base = OTHER; note = 2'-O-methylguanosine-3'-phosphate
  modified_base 4: mod_base = OTHER; note = 2'-O-methyladenosine-3'-phosphate
  modified_base 5: mod_base = OTHER; note = 2'-O-methyladenosine-3'-phosphate
  modified_base 6: mod_base = OTHER; note = 2'-O-methylguanosine-3'-phosphate
  modified_base 7: mod_base = OTHER; note = 2'-deoxy-2'-fluoroadenosine-3'-phosphate
  modified_base 8: mod_base = OTHER; note = 2'-O-methyladenosine-3'-phosphate
  modified_base 9: mod_base = OTHER; note = 2'-deoxy-2'-fluoroadenosine-3'-phosphate
  modified_base 10: mod_base = OTHER; note = 2'-deoxy-2'-fluorocytidine-3'-phosphate
  modified_base 11: mod_base = OTHER; note = 2'-deoxy-2'-fluoroguanosine-3'-phosphate
  modified_base 12: mod_base = OTHER; note = 2'-O-methyluridine-3'-phosphate
  modified_base 13: mod_base = OTHER; note = 2'-O-methylguanosine-3'-phosphate
  modified_base 14: mod_base = OTHER; note = 2'-O-methylcytidine-3'-phosphate
  modified_base 15: mod_base = OTHER; note = 2'-O-methyladenosine-3'-phosphate
  modified_base 16: mod_base = OTHER; note = 2'-O-methyluridine-3'-phosphate
  modified_base 17: mod_base = OTHER; note = 2'-O-methyluridine-3'-phosphate
  modified_base 18: mod_base = OTHER; note = 2'-O-methylcytidine-3'-phosphate
  modified_base 19: mod_base = OTHER; note = 2'-O-methyluridine-3'-phosphate
  modified_base 20: mod_base = OTHER; note = 2'-O-methyladenosine-3'-phosphate
  modified_base 21: mod_base = OTHER; note = 2'-O-methyladenosine-3'-phosphate ((2S,4R)-1-[29-[[2-(acetylamino)-2-deoxy-beta-D-galactopyra nosyl]oxy]-14,14-bis[[3-[[3-[[5-[[2-(acetylamino)-2-deoxy-b eta-D-galactopyranosyl]oxy]-1-oxopentyl]amino]propyl]amino] -3-oxopropoxy]methyl]-1,12,19,25-tetraoxo-16-oxa-13,20,24-t riazanonacos-1-yl]-4-hydroxy-2-pyrrolidinyl)methyl ester
ccgaagaaacgtgcattctaa

SEQ ID NO: 890 - RNA, 23 nt, synthetic construct
  source 1..23: mol_type = other RNA
  modified_base 1: mod_base = OTHER; note = 2'-O-methyluridine-3'-phosphorothioate
  modified_base 2: mod_base = OTHER; note = 2'-deoxy-2'-fluorouridine-3'-phosphorothioate
  modified_base 3: mod_base = OTHER; note = 2'-O-methyladenosine-3'-phosphate
  modified_base 4: mod_base = OTHER; note = 2'-O-methylguanosine-3'-phosphate
  modified_base 5: mod_base = OTHER; note = 2'-O-methyladenosine-3'-phosphate
  modified_base 6: mod_base = OTHER; note = 2'-deoxy-2'-fluoroadenosine-3'-phosphate
  modified_base 7: mod_base = OTHER; note = 2'-O-methyluridine-3'-phosphate
  modified_base 8: mod_base = OTHER; note = 2'-deoxy-2'-fluoroguanosine-3'-phosphate
  modified_base 9: mod_base = OTHER; note = 2'-deoxy-2'-fluorocytidine-3'-phosphate
  modified_base 10: mod_base = OTHER; note = 2'-O-methyladenosine-3'-phosphate
  modified_base 11: mod_base = OTHER; note = 2'-O-methylcytidine-3'-phosphate
  modified_base 12: mod_base = OTHER; note = 2'-O-methylguanosine-3'-phosphate
  modified_base 13: mod_base = OTHER; note = 2'-O-methyluridine-3'-phosphate
  modified_base 14: mod_base = OTHER; note = 2'-deoxy-2'-fluorouridine-3'-phosphate
  modified_base 15: mod_base = OTHER; note = 2'-O-methyluridine-3'-phosphate
  modified_base 16: mod_base = OTHER; note = 2'-deoxy-2'-fluorocytidine-3'-phosphate
  modified_base 17: mod_base = OTHER; note = 2'-O-methyluridine-3'-phosphate
  modified_base 18: mod_base = OTHER; note = 2'-O-methyluridine-3'-phosphate
  modified_base 19: mod_base = OTHER; note = 2'-O-methylcytidine-3'-phosphate
  modified_base 20: mod_base = OTHER; note = 2'-O-methylguanosine-3'-phosphate
  modified_base 21: mod_base = OTHER; note = 2'-O-methylguanosine-3'-phosphorothioate
  modified_base 22: mod_base = OTHER; note = 2'-O-methylguanosine-3'-phosphorothioate
  modified_base 23: mod_base = OTHER; note = 2'-O-methyladenosine
ttagaatgcacgtttcttcggga

SEQ ID NO: 891 - RNA, 21 nt, synthetic construct
  source 1..21: mol_type = other RNA
  modified_base 1: mod_base = OTHER; note = 2'-O-methylguanosine-3'-phosphorothioate
  modified_base 2: mod_base = OTHER; note = 2'-O-methyluridine-3'-phosphorothioate
  modified_base 3: mod_base = OTHER; note = 2'-O-methylguanosine-3'-phosphate
  modified_base 4: mod_base = OTHER; note = 2'-O-methyluridine-3'-phosphate
  modified_base 5: mod_base = OTHER; note = 2'-O-methylcytidine-3'-phosphate
  modified_base 6: mod_base = OTHER; note = 2'-O-methyladenosine-3'-phosphate
  modified_base 7: mod_base = OTHER; note = 2'-deoxy-2'-fluoroadenosine-3'-phosphate
  modified_base 8: mod_base = OTHER; note = 2'-O-methyladenosine-3'-phosphate
  modified_base 9: mod_base = OTHER; note = 2'-deoxy-2'-fluoroadenosine-3'-phosphate
  modified_base 10: mod_base = OTHER; note = 2'-deoxy-2'-fluorouridine-3'-phosphate
  modified_base 11: mod_base = OTHER; note = 2'-deoxy-2'-fluorouridine-3'-phosphate
  modified_base 12: mod_base = OTHER; note = 2'-O-methyluridine-3'-phosphate
  modified_base 13: mod_base = OTHER; note = 2'-O-methyluridine-3'-phosphate
  modified_base 14: mod_base = OTHER; note = 2'-O-methylcytidine-3'-phosphate
  modified_base 15: mod_base = OTHER; note = 2'-O-methyluridine-3'-phosphate
  modified_base 16: mod_base = OTHER; note = 2'-O-methyladenosine-3'-phosphate
  modified_base 17: mod_base = OTHER; note = 2'-O-methylcytidine-3'-phosphate
  modified_base 18: mod_base = OTHER; note = 2'-O-methyladenosine-3'-phosphate
  modified_base 19: mod_base = OTHER; note = 2'-O-methyluridine-3'-phosphate
  modified_base 20: mod_base = OTHER; note = 2'-O-methyluridine-3'-phosphate
  modified_base 21: mod_base = OTHER; note = 2'-O-methyladenosine-3'-phosphate ((2S,4R)-1-[29-[[2-(acetylamino)-2-deoxy-beta-D-galactopyra nosyl]oxy]-14,14-bis[[3-[[3-[[5-[[2-(acetylamino)-2-deoxy-b eta-D-galactopyranosyl]oxy]-1-oxopentyl]amino]propyl]amino] -3-oxopropoxy]methyl]-1,12,19,25-tetraoxo-16-oxa-13,20,24-t riazanonacos-1-yl]-4-hydroxy-2-pyrrolidinyl)methyl ester
gtgtcaaaattttctacatta

SEQ ID NO: 892 - RNA, 23 nt, synthetic construct
  source 1..23: mol_type = other RNA
  modified_base 1: mod_base = OTHER; note = 2'-O-methyluridine-3'-phosphorothioate
  modified_base 2: mod_base = OTHER; note = 2'-deoxy-2'-fluoroadenosine-3'-phosphorothioate
  modified_base 3: mod_base = OTHER; note = 2'-O-methyladenosine-3'-phosphate
  modified_base 4: mod_base = OTHER; note = 2'-O-methyluridine-3'-phosphate
  modified_base 5: mod_base = OTHER; note = 2'-O-methylguanosine-3'-phosphate
  modified_base 6: mod_base = OTHER; note = 2'-deoxy-2'-fluorouridine-3'-phosphate
  modified_base 7: mod_base = OTHER; note = 2'-O-methyladenosine-3'-phosphate
  modified_base 8: mod_base = OTHER; note = 2'-deoxy-2'-fluoroguanosine-3'-phosphate
  modified_base 9: mod_base = OTHER; note = 2'-deoxy-2'-fluoroadenosine-3'-phosphate
  modified_base 10: mod_base = OTHER; note = 2'-O-methyladenosine-3'-phosphate
  modified_base 11: mod_base = OTHER; note = 2'-O-methyladenosine-3'-phosphate
  modified_base 12: mod_base = OTHER; note = 2'-O-methyladenosine-3'-phosphate
  modified_base 13: mod_base = OTHER; note = 2'-O-methyluridine-3'-phosphate
  modified_base 14: mod_base = OTHER; note = 2'-deoxy-2'-fluorouridine-3'-phosphate
  modified_base 15: mod_base = OTHER; note = 2'-O-methyluridine-3'-phosphate
  modified_base 16: mod_base = OTHER; note = 2'-deoxy-2'-fluorouridine-3'-phosphate
  modified_base 17: mod_base = OTHER; note = 2'-O-methylguanosine-3'-phosphate
  modified_base 18: mod_base = OTHER; note = 2'-O-methyladenosine-3'-phosphate
  modified_base 19: mod_base = OTHER; note = 2'-O-methylcytidine-3'-phosphate
  modified_base 20: mod_base = OTHER; note = 2'-O-methyladenosine-3'-phosphate
  modified_base 21: mod_base = OTHER; note = 2'-O-methylcytidine-3'-phosphorothioate
  modified_base 22: mod_base = OTHER; note = 2'-O-methyladenosine-3'-phosphorothioate
  modified_base 23: mod_base = OTHER; note = 2'-O-methyladenosine
taatgtagaaaattttgacacaa

SEQ ID NO: 893 - RNA, 21 nt, synthetic construct
  source 1..21: mol_type = other RNA
ccgaagaaacgtgcattctaa

SEQ ID NO: 894 - RNA, 23 nt, synthetic construct
  source 1..23: mol_type = other RNA
ttagaatgcacgtttcttcggga

SEQ ID NO: 895 - RNA, 21 nt, synthetic construct
  source 1..21: mol_type = other RNA
gtgtcaaaattttctacatta

SEQ ID NO: 896 - RNA, 23 nt, synthetic construct
  source 1..23: mol_type = other RNA
taatgtagaaaattttgacacaa

SEQ ID NO: 897 - RNA, 21 nt, synthetic construct
  source 1..21: mol_type = other RNA
  modified_base 1: mod_base = OTHER; note = 2'-O-methylguanosine-3'-phosphorothioate
  modified_base 2: mod_base = OTHER; note = 2'-O-methylguanosine-3'-phosphorothioate
  modified_base 3: mod_base = OTHER; note = 2'-O-methyluridine-3'-phosphate
  modified_base 4: mod_base = OTHER; note = 2'-O-methylcytidine-3'-phosphate
  modified_base 5: mod_base = OTHER; note = 2'-O-methyladenosine-3'-phosphate
  modified_base 6: mod_base = OTHER; note = 2'-O-methylguanosine-3'-phosphate
  modified_base 7: mod_base = OTHER; note = 2'-deoxy-2'-fluoroadenosine-3'-phosphate
  modified_base 8: mod_base = OTHER; note = 2'-O-methyluridine-3'-phosphate
  modified_base 9: mod_base = OTHER; note = 2'-deoxy-2'-fluorocytidine-3'-phosphate
  modified_base 10: mod_base = OTHER; note = 2'-deoxy-2'-fluorouridine-3'-phosphate
  modified_base 11: mod_base = OTHER; note = 2'-deoxy-2'-fluorouridine-3'-phosphate
  modified_base 12: mod_base = OTHER; note = 2'-O-methylcytidine-3'-phosphate
  modified_base 13: mod_base = OTHER; note = 2'-O-methyladenosine-3'-phosphate
  modified_base 14: mod_base = OTHER; note = 2'-O-methyladenosine-3'-phosphate
  modified_base 15: mod_base = OTHER; note = 2'-O-methyladenosine-3'-phosphate
  modified_base 16: mod_base = OTHER; note = 2'-O-methyladenosine-3'-phosphate
  modified_base 17: mod_base = OTHER; note = 2'-O-methyluridine-3'-phosphate
  modified_base 18: mod_base = OTHER; note = 2'-O-methyladenosine-3'-phosphate
  modified_base 19: mod_base = OTHER; note = 2'-O-methyladenosine-3'-phosphate
  modified_base 20: mod_base = OTHER; note = 2'-O-methyladenosine-3'-phosphate
  modified_base 21: mod_base = OTHER; note = 2'-O-methyluridine-3'-phosphate ((2S,4R)-1-[29-[[2-(acetylamino)-2-deoxy-beta-D-galactopyra nosyl]oxy]-14,14-bis[[3-[[3-[[5-[[2-(acetylamino)-2-deoxy-b eta-D-galactopyranosyl]oxy]-1-oxopentyl]amino]propyl]amino] -3-oxopropoxy]methyl]-1,12,19,25-tetraoxo-16-oxa-13,20,24-t riazanonacos-1-yl]-4-hydroxy-2-pyrrolidinyl)methyl ester
ggtcagatcttcaaaataaat

SEQ ID NO: 898 - RNA, 23 nt, synthetic construct
  source 1..23: mol_type = other RNA
  modified_base 1: mod_base = OTHER; note = 2'-O-methyladenosine-3'-phosphorothioate
  modified_base 2: mod_base = OTHER; note = 2'-deoxy-2'-fluorouridine-3'-phosphorothioate
  modified_base 3: mod_base = OTHER; note = 2'-O-methyluridine-3'-phosphate
  modified_base 4: mod_base = OTHER; note = 2'-O-methyluridine-3'-phosphate
  modified_base 5: mod_base = OTHER; note = 2'-O-methyladenosine-3'-phosphate
  modified_base 6: mod_base = OTHER; note = 2'-deoxy-2'-fluorouridine-3'-phosphate
  modified_base 7: mod_base = OTHER; note = 2'-O-methyluridine-3'-phosphate
  modified_base 8: mod_base = OTHER; note = 2'-deoxy-2'-fluorouridine-3'-phosphate
  modified_base 9: mod_base = OTHER; note = 2'-deoxy-2'-fluorouridine-3'-phosphate
  modified_base 10: mod_base = OTHER; note = 2'-O-methylguanosine-3'-phosphate
  modified_base 11: mod_base = OTHER; note = 2'-O-methyladenosine-3'-phosphate
  modified_base 12: mod_base = OTHER; note = 2'-O-methyladenosine-3'-phosphate
  modified_base 13: mod_base = OTHER; note = 2'-O-methylguanosine-3'-phosphate
  modified_base 14: mod_base = OTHER; note = 2'-deoxy-2'-fluoroadenosine-3'-phosphate
  modified_base 15: mod_base = OTHER; note = 2'-O-methyluridine-3'-phosphate
  modified_base 16: mod_base = OTHER; note = 2'-deoxy-2'-fluorocytidine-3'-phosphate
  modified_base 17: mod_base = OTHER; note = 2'-O-methyluridine-3'-phosphate
  modified_base 18: mod_base = OTHER; note = 2'-O-methylguanosine-3'-phosphate
  modified_base 19: mod_base = OTHER; note = 2'-O-methyladenosine-3'-phosphate
  modified_base 20: mod_base = OTHER; note = 2'-O-methylcytidine-3'-phosphate
  modified_base 21: mod_base = OTHER; note = 2'-O-methylcytidine-3'-phosphorothioate
  modified_base 22: mod_base = OTHER; note = 2'-O-methylguanosine-3'-phosphorothioate
  modified_base 23: mod_base = OTHER; note = 2'-O-methylguanosine
atttattttgaagatctgaccgg

SEQ ID NO: 899 - RNA, 21 nt, synthetic construct
  source 1..21: mol_type = other RNA
  modified_base 1: mod_base = OTHER; note = 2'-O-methyladenosine-3'-phosphorothioate
  modified_base 2: mod_base = OTHER; note = 2'-O-methyluridine-3'-phosphorothioate
  modified_base 3: mod_base = OTHER; note = 2'-O-methylguanosine-3'-phosphate
  modified_base 4: mod_base = OTHER; note = 2'-O-methylguanosine-3'-phosphate
  modified_base 5: mod_base = OTHER; note = 2'-O-methyluridine-3'-phosphate
  modified_base 6: mod_base = OTHER; note = 2'-O-methylcytidine-3'-phosphate
  modified_base 7: mod_base = OTHER; note = 2'-deoxy-2'-fluoroadenosine-3'-phosphate
  modified_base 8: mod_base = OTHER; note = 2'-O-methylguanosine-3'-phosphate
  modified_base 9: mod_base = OTHER; note = 2'-deoxy-2'-fluoroadenosine-3'-phosphate
  modified_base 10: mod_base = OTHER; note = 2'-deoxy-2'-fluorouridine-3'-phosphate
  modified_base 11: mod_base = OTHER; note = 2'-deoxy-2'-fluorocytidine-3'-phosphate
  modified_base 12: mod_base = OTHER; note = 2'-O-methyluridine-3'-phosphate
  modified_base 13: mod_base = OTHER; note = 2'-O-methyluridine-3'-phosphate
  modified_base 14: mod_base = OTHER; note = 2'-O-methylcytidine-3'-phosphate
  modified_base 15: mod_base = OTHER; note = 2'-O-methyladenosine-3'-phosphate
  modified_base 16: mod_base = OTHER; note = 2'-O-methyladenosine-3'-phosphate
  modified_base 17: mod_base = OTHER; note = 2'-O-methyladenosine-3'-phosphate
  modified_base 18: mod_base = OTHER; note = 2'-O-methyladenosine-3'-phosphate
  modified_base 19: mod_base = OTHER; note = 2'-O-methyluridine-3'-phosphate
  modified_base 20: mod_base = OTHER; note = 2'-O-methyladenosine-3'-phosphate
  modified_base 21: mod_base = OTHER; note = 2'-O-methyladenosine-3'-phosphate ((2S,4R)-1-[29-[[2-(acetylamino)-2-deoxy-beta-D-galactopyra nosyl]oxy]-14,14-bis[[3-[[3-[[5-[[2-(acetylamino)-2-deoxy-b eta-D-galactopyranosyl]oxy]-1-oxopentyl]amino]propyl]amino] -3-oxopropoxy]methyl]-1,12,19,25-tetraoxo-16-oxa-13,20,24-t riazanonacos-1-yl]-4-hydroxy-2-pyrrolidinyl)methyl ester
atggtcagatcttcaaaataa

SEQ ID NO: 900 - RNA, 23 nt, synthetic construct
  source 1..23: mol_type = other RNA
  modified_base 1: mod_base = OTHER; note = 2'-O-methyluridine-3'-phosphorothioate
  modified_base 2: mod_base = OTHER; note = 2'-deoxy-2'-fluorouridine-3'-phosphorothioate
  modified_base 3: mod_base = OTHER; note = 2'-O-methyladenosine-3'-phosphate
  modified_base 4: mod_base = OTHER; note = 2'-O-methyluridine-3'-phosphate
  modified_base 5: mod_base = OTHER; note = 2'-O-methyluridine-3'-phosphate
  modified_base 6: mod_base = OTHER; note = 2'-O-methyluridine-3'-phosphate
  modified_base 7: mod_base = OTHER; note = Thymidine-glycol nucleic acid (GNA), S-Isomer
  modified_base 8: mod_base = OTHER; note = 2'-O-methylguanosine-3'-phosphate
  modified_base 9: mod_base = OTHER; note = 2'-O-methyladenosine-3'-phosphate
  modified_base 10: mod_base = OTHER; note = 2'-O-methyladenosine-3'-phosphate
  modified_base 11: mod_base = OTHER; note = 2'-O-methylguanosine-3'-phosphate
  modified_base 12: mod_base = OTHER; note = 2'-O-methyladenosine-3'-phosphate
  modified_base 13: mod_base = OTHER; note = 2'-O-methyluridine-3'-phosphate
  modified_base 14: mod_base = OTHER; note = 2'-deoxy-2'-fluorocytidine-3'-phosphate
  modified_base 15: mod_base = OTHER; note = 2'-O-methyluridine-3'-phosphate
  modified_base 16: mod_base = OTHER; note = 2'-deoxy-2'-fluoroguanosine-3'-phosphate
  modified_base 17: mod_base = OTHER; note = 2'-O-methyladenosine-3'-phosphate
  modified_base 18: mod_base = OTHER; note = 2'-O-methylcytidine-3'-phosphate
  modified_base 19: mod_base = OTHER; note = 2'-O-methylcytidine-3'-phosphate
  modified_base 20: mod_base = OTHER; note = 2'-O-methyladenosine-3'-phosphate
  modified_base 21: mod_base = OTHER; note = 2'-O-methyluridine-3'-phosphorothioate
  modified_base 22: mod_base = OTHER; note = 2'-O-methyluridine-3'-phosphorothioate
  modified_base 23: mod_base = OTHER; note = 2'-O-methylguanosine
ttattttgaagatctgaccattg

SEQ ID NO: 901 - RNA, 21 nt, synthetic construct
  source 1..21: mol_type = other RNA
  modified_base 1: mod_base = OTHER; note = 2'-O-methylcytidine-3'-phosphorothioate
  modified_base 2: mod_base = OTHER; note = 2'-O-methyladenosine-3'-phosphorothioate
  modified_base 3: mod_base = OTHER; note = 2'-O-methyluridine-3'-phosphate
  modified_base 4: mod_base = OTHER; note = 2'-O-methylguanosine-3'-phosphate
  modified_base 5: mod_base = OTHER; note = 2'-O-methyluridine-3'-phosphate
  modified_base 6: mod_base = OTHER; note = 2'-O-methylguanosine-3'-phosphate
  modified_base 7: mod_base = OTHER; note = 2'-deoxy-2'-fluorocytidine-3'-phosphate
  modified_base 8: mod_base = OTHER; note = 2'-O-methyladenosine-3'-phosphate
  modified_base 9: mod_base = OTHER; note = 2'-deoxy-2'-fluorocytidine-3'-phosphate
  modified_base 10: mod_base = OTHER; note = 2'-deoxy-2'-fluoroadenosine-3'-phosphate
  modified_base 11: mod_base = OTHER; note = 2'-deoxy-2'-fluorouridine-3'-phosphate
  modified_base 12: mod_base = OTHER; note = 2'-O-methyluridine-3'-phosphate
  modified_base 13: mod_base = OTHER; note = 2'-O-methylguanosine-3'-phosphate
  modified_base 14: mod_base = OTHER; note = 2'-O-methyladenosine-3'-phosphate
  modified_base 15: mod_base = OTHER; note = 2'-O-methyladenosine-3'-phosphate
  modified_base 16: mod_base = OTHER; note = 2'-O-methyladenosine-3'-phosphate
  modified_base 17: mod_base = OTHER; note = 2'-O-methyladenosine-3'-phosphate
  modified_base 18: mod_base = OTHER; note = 2'-O-methylcytidine-3'-phosphate
  modified_base 19: mod_base = OTHER; note = 2'-O-methyluridine-3'-phosphate
  modified_base 20: mod_base = OTHER; note = 2'-O-methylguanosine-3'-phosphate
  modified_base 21: mod_base = OTHER; note = 2'-O-methyluridine-3'-phosphate ((2S,4R)-1-[29-[[2-(acetylamino)-2-deoxy-beta-D-galactopyra nosyl]oxy]-14,14-bis[[3-[[3-[[5-[[2-(acetylamino)-2-deoxy-b eta-D-galactopyranosyl]oxy]-1-oxopentyl]amino]propyl]amino] -3-oxopropoxy]methyl]-1,12,19,25-tetraoxo-16-oxa-13,20,24-t riazanonacos-1-yl]-4-hydroxy-2-pyrrolidinyl)methyl ester
catgtgcacattgaaaactgt

SEQ ID NO: 902 - RNA, 23 nt, synthetic construct
  source 1..23: mol_type = other RNA
  modified_base 1: mod_base = OTHER; note = 2'-O-methyladenosine-3'-phosphorothioate
  modified_base 2: mod_base = OTHER; note = 2'-deoxy-2'-fluorocytidine-3'-phosphorothioate
  modified_base 3: mod_base = OTHER; note = 2'-O-methyladenosine-3'-phosphate
  modified_base 4: mod_base = OTHER; note = 2'-deoxy-2'-fluoroguanosine-3'-phosphate
  modified_base 5: mod_base = OTHER; note = 2'-O-methyluridine-3'-phosphate
  modified_base 6: mod_base = OTHER; note = 2'-O-methyluridine-3'-phosphate
  modified_base 7: mod_base = OTHER; note = Thymidine-glycol nucleic acid (GNA), S-Isomer
  modified_base 8: mod_base = OTHER; note = 2'-deoxy-2'-fluorouridine-3'-phosphate
  modified_base 9: mod_base = OTHER; note = 2'-deoxy-2'-fluorocytidine-3'-phosphate
  modified_base 10: mod_base = OTHER; note = 2'-O-methyladenosine-3'-phosphate
  modified_base 11: mod_base = OTHER; note = 2'-O-methyladenosine-3'-phosphate
  modified_base 12: mod_base = OTHER; note = 2'-deoxy-2'-fluorouridine-3'-phosphate
  modified_base 13: mod_base = OTHER; note = 2'-O-methylguanosine-3'-phosphate
  modified_base 14: mod_base = OTHER; note = 2'-deoxy-2'-fluorouridine-3'-phosphate
  modified_base 15: mod_base = OTHER; note = 2'-O-methylguanosine-3'-phosphate
  modified_base 16: mod_base = OTHER; note = 2'-deoxy-2'-fluorocytidine-3'-phosphate
  modified_base 17: mod_base = OTHER; note = 2'-O-methyladenosine-3'-phosphate
  modified_base 18: mod_base = OTHER; note = 2'-O-methylcytidine-3'-phosphate
  modified_base 19: mod_base = OTHER; note = 2'-O-methyladenosine-3'-phosphate
  modified_base 20: mod_base = OTHER; note = 2'-O-methyluridine-3'-phosphate
  modified_base 21: mod_base = OTHER; note = 2'-O-methylguanosine-3'-phosphorothioate
  modified_base 22: mod_base = OTHER; note = 2'-O-methylcytidine-3'-phosphorothioate
  modified_base 23: mod_base = OTHER; note = 2'-O-methylguanosine
acagttttcaatgtgcacatgcg

SEQ ID NO: 903 - protein, 16 aa, synthetic construct
AAVALLPAVLLALLAP

SEQ ID NO: 904 - protein, 11 aa, synthetic construct
AALLPVLLAAP

SEQ ID NO: 905 - protein, 13 aa, Human immunodeficiency virus 1
GRKKRRQRRRPPQ

SEQ ID NO: 906 - protein, 16 aa, Drosophila sp.
RQIKIWFQNRRMKWKK

1. A double-stranded ribonucleic acid (dsRNA) for inhibiting expression of LECT2,
wherein said dsRNA comprises a sense strand and an antisense strand, the antisense strand comprising a region of complementarity to a LECT2 RNA transcript, wherein the antisense strand comprises at least 15 contiguous nucleotides differing by no more than 3 nucleotides from the antisense sequence set forth as SEQ ID NO: 371, or a pharmaceutically acceptable salt thereof, and optionally wherein said dsRNA comprises at least one modified nucleotide.

2.-3. (canceled)

4. The dsRNA of claim 1,
wherein the dsRNA comprises a duplex region that is 15-30 base pairs, 17-25 base pairs, 19-22 base pairs, or 21 base pairs in length;
wherein the region of complementarity is at least 17 nucleotides, between 21 and 25 nucleotides, or 23 nucleotides in length;
wherein at least one strand comprises a 3′ overhang of at least 1 nucleotide or 2 nucleotides; and/or
wherein dsRNA comprises a blunt end.

5.-12. (canceled)

13. The dsRNA of claim 1, wherein said at least one of said modified nucleotides is chosen from the group consisting of:
a 2′-O-methyl modified nucleotide, a nucleotide comprising a 5′-phosphorothioate group, and a terminal nucleotide linked to a cholesteryl derivative or dodecanoic acid bisdecylamide group,
a 2′-deoxy-2′-fluoro modified nucleotide, a 2′-deoxy-modified nucleotide, a locked nucleic acid (LNA), an acyclic nucleotide, an abasic nucleotide, a glycol nucleotide (GNA), 2′-amino-modified nucleotide, 2′-alkyl-modified nucleotide, morpholino nucleotide, a phosphoramidate, and a non-natural base comprising nucleotide;
a locked nucleic acid (LNA), an acyclic nucleotide, a hexitol or hexose nucleic acid (HNA), a cyclohexene nucleic acid (CeNA), a glycol nucleic acid (GNA), 2′-methoxyethyl, 2′-O-alkyl, 2′-O-allyl, 2′-C-allyl, 2′-fluoro, 2′-O-methyl, 2′-deoxy, 2′-hydroxyl, and combinations thereof; or
2′-O-methyl, 2′-fluoro, or both, and optionally GNA.

14.-16. (canceled)

17. The dsRNA of claim 1, wherein the sense strand is conjugated to at least one ligand, and optionally
wherein the ligand is attached to the 3′ end of the sense strand,
wherein the ligand comprises a carbohydrate or a GalNAc ligand,
wherein the ligand is [chemical structure]
wherein the ligand is attached via a linker, a bivalent branched linker, a trivalent branched linker,
wherein the ligand and linker are as shown in Formula XXIV: [chemical structure]
and/or
wherein the ligand targets the dsRNA to hepatocytes.

18.-25. (canceled)

26. The dsRNA of claim 1, wherein the region of complementarity consists of an antisense sequence set forth as SEQ ID NO: 371, or
wherein the dsRNA comprises a sense strand consisting of a sense sequence set forth as SEQ ID NO: 370, and an antisense strand consisting of the antisense sequence set forth as SEQ ID NO: 371.

27. (canceled)

28. A double-stranded ribonucleic acid (dsRNA) for inhibiting expression of LECT2, wherein said dsRNA comprises a sense strand and an antisense strand, the antisense strand comprising a region of complementarity to a LECT2 RNA transcript, wherein the sense strand comprises the sequence and all of the modifications of gsgsucagAfuCfUfUfcaaaauaaauL96 (SEQ ID NO: 143) and the antisense strand comprises the sequence and all of the modifications of asUfsuuaUfuUfUfgaagAfuCfugaccsgsg (SEQ ID NO: 144),
and wherein a, g, c and u are 2′-O-methyl (2′-OMe) A, G, C, and U: s is a phosphorothioate linkage: Af, Cf, Gf, and Uf are 2′-fluoro A, C, G, and U; and L96 is N-[tris(GalNAc-alkyl)-amidodecanoyl)]-4-hydroxyprolinol Hyp-(GalNAc-alkyl)3.

29. A double-stranded ribonucleic acid (dsRNA) for inhibiting expression of LECT2, wherein said dsRNA comprises a sense strand and an antisense strand, the antisense strand comprising a region of complementarity to a LECT2 RNA transcript, wherein the region of complementarity is substantially complementary to nucleotides 669-691 of SEQ ID NO: 1; or
wherein the sense strand comprises the sequence of SEQ ID NO: 370, and the antisense strand comprises the sequence of SEQ ID NO: 371.

30. (canceled)

31. A pharmaceutical composition for inhibiting expression of a LECT2 gene, wherein the composition comprises the dsRNA of claim 1 and optionally a lipid formulation, an LNP formulation, or an LNP11 formulation, and optionally
wherein the dsRNA is conjugated to a carbohydrate ligand or a GalNAc ligand,
wherein the dsRNA is administered in an unbuffered solution, saline, water, a buffer solution, acetate, citrate, prolamine, carbonate, phosphate, phosplate buffered saline, or any combination thereof, and/or
wherein the composition is administered intravenously or subcutaneously.

32.-39. (canceled)

40. The pharmaceutical composition of claim 31, wherein the dsRNA is targeted to a liver cell or a hepatocyte.

41.-44. (canceled)

45. A method of inhibiting LECT2 expression in a cell, the method comprising:
(a) contacting the cell with the dsRNA of claim 1, and
(b) maintaining the cell of step (a) for a time sufficient to obtain degradation of the mRNA transcript of a LECT2 gene, thereby inhibiting expression of the LECT2 gene in the cell,
wherein the cell is contacted with the dsRNA ex vivo, in vitro, or in vivo,
optionally wherein the cell is present in a subject in need of treatment, prevention, and/or management of a disorder related to LECT2 expression and
optionally wherein the disorder is amyloydosis.

46.-49. (canceled)

50. The method of claim 45, wherein the cell is a liver cell or a hepatocyte.

51. The method of claim 45, wherein the expression of LECT2 is inhibited by at least 20%.

52. (canceled)

53. A method of treating a disorder related to LECT2 expression, comprising administering to a subject in need of such treatment a therapeutically effective amount of
(i) the dsRNA of claim 1 or
(ii) a pharmaceutical composition for inhibiting expression of a LECT2 gene, wherein the composition comprises the dsRNA of claim 1 and optionally a lipid formulation, an LNP formulation, or an LNP11 formulation, optionally wherein the dsRNA is conjugated to a carbohydrate ligand or a GalNAc ligand, and optionally wherein the dsRNA is targeted to a liver cell or a hepatocyte.

54. A method of treating LECT2 amyloidosis, comprising administering to a subject in need of such treatment a therapeutically effective amount of
(i) the dsRNA of claim 1 or
(ii) a pharmaceutical composition for inhibiting expression of a LECT2 gene, wherein the composition comprises the dsRNA of claim 1 and optionally a lipid formulation, an LNP formulation, or an LNP11 formulation, optionally wherein the dsRNA is conjugated to a carbohydrate ligand or a GalNAc ligand, and optionally wherein the dsRNA is targeted to a liver cell or a hepatocyte,
optionally wherein the dsRNA or the pharmaceutical composition is administered according to a dosing regimen.

55.-58. (canceled)

59. The method of claim 45, wherein the method reduces LECT2 amyloid deposition.

60. A method of reducing LECT2 amyloid deposition in a subject having a LECT2 amyloidosis, the method comprising administering to the subject
(i) the dsRNA of claim 1 or
(ii) a pharmaceutical composition for inhibiting expression of a LECT2 gene, wherein the composition comprises the dsRNA of claim 1 and optionally a lipid formulation, an LNP formulation, or an LNP11 formulation, optionally wherein the dsRNA is conjugated to a carbohydrate ligand or a GalNAc ligand, and optionally wherein the dsRNA is targeted to a liver cell or a hepatocyte.

61. The method of claim 53, wherein the dsRNA is administered at a dose of 0.05-50 mg/kg, or at a dose of 0.01 mg/kg to 5 mg/kg,
wherein the dsRNA is formulated as an LNP formulation and is administered at a dose of 0.1 mg/kg to 0.5 mg/kg, and/or
wherein the dsRNA is conjugated to a GalNAc ligand.

62.-64. (canceled)

65. The method of claim 53, wherein the dsRNA is conjugated to a GalNAc ligand and is administered at a dose of 1 mg/kg to 10 mg/kg, optionally at a dose of 1 mg/kg or 3 mg/kg.

66. A vector encoding at least one strand of the dsRNA of claim 1.

67. A cell comprising at least one strand of the dsRNA of claim 1 or a vector comprising at least one strand of the dsRNA of claim 1.
